(19) United States
(12) Patent Application Publication
(10) Pub. No.: US 2021/0130465 A1
(43) Pub. Date: May 6, 2021

(54) Bispecific Antibody Construct Directed to MUC17 and CD3

(71) Applicants: AMGEN INC., Thousand Oaks, CA (US); AMGEN RESEARCH (MUNICH) GMBH, Munich (DE)

(72) Inventors: Tobias Raum, Munich (DE); Tara Arvedson, Thousand Oaks, CA (US); Julie Bailis, Thousand Oaks, CA (US); Christoph Dahlhoff, Munich (DE); Sandra Ross, Thousand Oaks, CA (US); Irwin Chen, Thousand Oaks, CA (US); Claudia Blümel, Munich (DE); Elisabeth Nahrwold, Munich (DE); Jochen Pendzialek, Munich (DE); Joachim Wahl, Munich (DE)

(21) Appl. No.: 16/956,797

(22) PCT Filed: Dec. 31, 2018
(86) PCT No.: PCT/US2018/068118

§ 371 Date: Jun. 22, 2020

Related U.S. Application Data
(60) Provisional application No. 62/687,063, filed on Jun. 19, 2018.
(60) Provisional application No. 62/612,242, filed on Dec. 29, 2017.

(51) Int. Cl. C07K 16/28; C07K 16/30; A61P 35/00; A61K 9/00

(52) U.S. Cl. CPC C07K 16/2809; C07K 16/3092; A61P 35/00; A61K 9/0019; A61K 2039/505; C07K 2317/622; C07K 2317/53; C07K 2317/524; C07K 2317/526; C07K 2317/31

(57) ABSTRACT

The present invention provides bispecific antibody constructs characterized by comprising a first domain binding to MUC17, a second domain binding to an extracellular epitope of the human and the Macaca CD3E chain and optionally a third domain, which is a specific Fc modality. Moreover, the invention provides a polynucleotide, encoding the antibody construct, a vector comprising this polynucleotide, host cells, expressing the construct and a pharmaceutical composition comprising the same.

### TECHNICAL FIELD

[0001] This invention relates to products and methods of biotechnology, in particular to bispecific antibodies constructs, their preparation and their use.

### BACKGROUND

[0002] Among the most quickly and promisingly developing therapeutics are protein-based pharmaceuticals which already have a significant role in almost every field of medicine and are among the fastest growing therapeutic agents in (pre)clinical development and as commercial products (Leader, Nature Reviews Drug Discovery 2008 Jan. 7, 21-39). In comparison to small chemical drugs, protein pharmaceuticals have high specificity and activity at relatively low concentrations, and typically provide for therapy of high impact diseases such as various cancers, auto-immune diseases, and metabolic disorders (Roberts, Trends Biotechnol. 2014 July; 32(7):372-80, Wang, Int J Pharm. 1999 Aug. 20; 185(2):129-88).

[0003] Such new protein-based pharmaceuticals comprise, for example, bispecific (monoclonal) antibodies which typically can simultaneously bind to two different types of antigen. They are known in several structural formats, and current applications have been explored for cancer immunotherapy and drug delivery (Fan, Gaowei; Wang, Zujian; Hao, Mingju; Li, Jinming (2015). “Bispecific antibodies and their applications”. Journal of Hematology & Oncology. 8: 130).

[0004] Bispecific antibodies can be IgG-like, i.e. full length bispecific antibodies, or non-IgG-like bispecific antibodies, which are not full-length antibody constructs. Full length bispecific antibodies typically retain the traditional monoclonal antibody (mAb) structure of two Fab arms and one Fc region, except the two Fab sites bind different antigens. Non full-length bispecific antibodies can lack an Fc region entirely. These include chemically linked Fabs, consisting of only the Fab regions, and various types of bivalent and trivalent single-chain variable fragments (scFvs). There are also fusion proteins mimicking the variable domains of two antibodies. An example of such a format is the bi-specific T-cell engager (BiTE®) (Yang, Fa; Wen, Weihong; Qin, Weijun (2016). “Bispecific Antibodies as a Development Platform for New Concepts and Treatment Strategies”. International Journal of Molecular Sciences. 18 (1): 48).

[0005] Bispecific antibody derived molecules such as BiTE® antibody constructs are recombinant protein constructs made from two flexibly linked antibody derived binding domains. One binding domain of BiTE® antibody constructs is specific for a selected tumor-associated surface antigen on target cells; the second binding domain is specific for CD3, a subunit of the T cell receptor complex on T cells. By their particular design, BiTE® antibody constructs are uniquely suited to transiently connect T cells with target cells and, at the same time, potently activate the inherent cytolytic potential of T cells against target cells. An important further development of the first generation of BiTE® antibody constructs (see WO 99/54440 and WO 2005/040220) developed into the clinic as AMG 103 and AMG 110 was the provision of bispecific antibody constructs binding to a context independent epitope at the N-terminus of the CD3E chain (WO 2008/119567). BiTE® antibody constructs binding to this elected epitope do not only show cross-species specificity for the human and the Macaca, or Callithrix jacchus, Saguinus oedipus or Saimiri sciureus CD3ε chain, but also, due to recognizing this specific epitope (instead of previously described epitopes of CD3 binders in bispecific T cell engaging molecules), do not demonstrate unspecific activation of T cells to the same degree as observed for the previous generation of T cell engaging antibodies. This reduction in T cell activation was connected with less or reduced T cell redistribution in patients, the latter being identified as a risk for side effects, e.g. in pasotuximab.

[0006] Antibody constructs as described in WO 2008/119567 are characterized by rapid clearance from the body; thus, while they are able to reach most parts of the body rapidly, their in vivo applications may be limited by their brief persistence in vivo. On the other hand, their concentration in the body can be adapted and fine-tuned at short notice. Prolonged administration by continuous intravenous infusion is used to achieve therapeutic effects because of the short in vivo half-life of this small, single chain molecule. However, now bispecific antibody constructs are available which have more favorable pharmacokinetic properties, including a longer half-life. An increased half-life is generally useful in in vivo applications of immunoglobulins, especially antibodies and most especially antibody fragments or constructs of small size, e.g. in the interest of patient compliance.

[0007] Mucins have been identified as interesting markers for inflammatory and cancerous diseases. Mucins are high molecular weight glycoproteins that are characterized by high levels of O-glycosylation at serine and threonine residues within tandem repeat domains (Johansson and Hansson, Nat. Rev. Immunology 2016). There are at least 20 mucin family members, including secreted proteins and transmembrane proteins, which are expressed by epithelial cells in different tissues (Corfield, Biochim. Biophys. Acta 2013). The main function of mucins is in the structure and regulation of the mucosal layer that forms a protective barrier between epithelial cells and the environment (Hollingsworth and Swanson, Nat. Rev. Cancer 2004; Hattrup and Gendler, Annu. Rev. Physiol. 2008). Transmembrane mucins also play a role in cellular signaling, including regulation of proliferation and apoptosis, and in tumorigenesis (Hollingsworth and Swanson, Nat. Rev. Cancer 2004). Among the mucins, Mucin 17 (MUC17) is a transmembrane mucin that was initially identified by its homology to MUC3 (Gum et al., Biochem. Biophys. Res. Comm 2002).

[0008] Analysis of the complete coding sequence of MUC17 revealed that it has a large extracellular domain composed of a central region of 61 tandem repeats, an epidermal growth factor (EGF) domain, a sea urchin sperm protein, enterokinase and agrin (SEA) domain, and a second EGF domain. The SEA domain contains a putative cleavage site that is conserved in other mucins (Moniaux et al., J. Biol. Chem. 2006). MUC17 is a single-pass transmembrane protein with an 80-amino acid cytoplasmic tail that is intracellular (Moniaux et al., J. Biol. Chem. 2006). The expression of MUC17 in healthy adults is restricted to the apical surface of enterocytes, or mature absorptive epithelial cells, that line the intestine (Moniaux et al., J. Biol. Chem. 2006; Johanasson and Hansson, Nat. Rev. Immunology 2016). MUC17 is also expressed by the stomach and pancreas (Moniaux et al., J. Biol. Chem. 2006; Moehle et al., J. Mol. Med. 2006). The biological function of MUC17 is considered to be the maintenance of mucosal barrier integrity in the intestinal tract, such as by mucosal restitution (Luu et al., Int. J. Biochem. Cell Biol. 2010; Resta-Lenert et al., Am. J. Physiology 2011; Johanasson and Hansson, Nat. Rev. Immunology 2016).

[0009] MUC17 is aberrantly expressed in some cancers. MUC17 mRNA was shown to be expressed in one pancreatic cancer cell line and three colon cancer cell lines (Gum et al. 2002) Immunohistochemistry studies confirmed expression of the MUC17 protein in pancreatic cancer ((Moniaux et al. 2006). In colon cancer, however, MUC17 protein expression was shown to be decreased (Senapati et al., J. Clin. Pathol. 2010). Nevertheless, the expression patterns of MUC17 make it a potential target for the treatment of different forms of malignancy.

### SUMMARY

[0010] In view of the conflicting implications in the literature with regard to MUC17 as a potential target for which pathological condition, it is the object of the present invention to clearly identify specific conditions associated with MUC17 upregulation and to provide bispecific antibody constructs, such as T cell engaging molecules, which are specifically suitable to bind MUC17 in a MUC17-associated condition, preferably for use in the treatment of said specific conditions. Accordingly, the present invention provides an antibody construct characterized by comprising a first domain binding to MUC17, a second domain binding to an extracellular epitope of the human and non-human, e.g. Macaca CD3c chain, and preferably a third domain, which is a specific Fc modality. Moreover, the invention provides a polynucleotide encoding the antibody construct, a vector comprising this polynucleotide, and host cells expressing the construct and a pharmaceutical composition comprising the same.

[0011] In a first aspect, it is envisaged in the context of the present invention to provide an antibody construct comprising:

[0012] a first domain which binds to MUC17 and

[0013] a second domain which binds to an extracellular epitope of the human and the Macaca CD3c chain.

[0014] Within said aspect, it is further envisaged in the context of the present invention that the antibody construct comprises a third domain which comprises two polypeptide monomers, each comprising a hinge, a CH2 domain and a CH3 domain, wherein said two polypeptide monomers are fused to each other via a peptide linker.

[0015] Within said aspect, it is further envisaged in the context of the present invention to provide an antibody construct which is a single chain antibody construct.

[0016] Within said aspect, it is also envisaged in the context of the present invention to provide an antibody construct wherein said third domain comprises in an amino to carboxyl order: hinge-CH2-CH3-linker-hinge-CH2-CH3.

[0017] Within said aspect, it is further envisaged in the context of the present invention to provide an antibody construct wherein each of said polypeptide monomers has an amino acid sequence that is at least 90% identical to a sequence selected from the group from the group consisting of: SEQ ID NO: 17-24.

[0018] Within said aspect, it is also envisaged in the context of the present invention to provide an antibody construct, wherein each of said polypeptide monomers has an amino acid sequence selected from SEQ ID NO: 17-24.

[0019] Within said aspect, it is further envisaged in the context of the present invention to provide an antibody construct, wherein the CH2 domain comprises an intra domain cysteine disulfide bridge.

[0020] Within said aspect, it is also envisaged in the context of the present invention to provide an antibody construct, wherein

(i) the first domain comprises two antibody variable domains and the second domain comprises two antibody variable domains;
(ii) the first domain comprises one antibody variable domain and the second domain comprises two antibody variable domains;
(iii) the first domain comprises two antibody variable domains and the second domain comprises one antibody variable domain; or
(iv) the first domain comprises one antibody variable domain and the second domain comprises one antibody variable domain.

[0021] Within said aspect, it is also envisaged in the context of the present invention to provide an antibody construct, wherein the first and second domain are fused to the third domain via a peptide linker.

[0022] Within said aspect, it is also envisaged in the context of the present invention to provide an antibody construct, wherein the antibody construct comprises in an amino to carboxyl order:

(a) the first domain;
(b) a peptide linker having an amino acid sequence selected from the group consisting of SEQ ID NOs: 1-3;
(c) the second domain

[0023] Within said aspect, it is also envisaged in the context of the present invention to provide an antibody construct, wherein the antibody construct in addition to (a) to (c) comprises in an amino to carboxyl order:

(d) a peptide linker having an amino acid sequence selected from the group consisting of SEQ ID NOs: 1, 2, 3, 9, 10, 11 and 12;
(e) the first polypeptide monomer of the third domain;
(f) a peptide linker having an amino acid sequence selected from the group consisting of SEQ ID NOs: 5, 6, 7 and 8; and
(g) the second polypeptide monomer of the third domain

[0024] Within said aspect, it is further envisaged in the context of the present invention to provide an antibody construct, wherein the first domain of the antibody construct binds to an epitope within MUC17 which corresponds to SEQ ID NO. 528 (aa 4171 to 4296 according to uniprot Q685J3 numbering).

[0025] Within said aspect, it is also envisaged in the context of the present invention to provide an antibody construct, wherein the first domain of the antibody construct binds to an epitope within MUC17 which corresponds to SEQ ID NO. 529 (aa 4184 to 4291 according to uniprot Q685J3 numbering).

[0026] Within said aspect, it is further envisaged in the context of the present invention to provide an antibody construct, wherein the first domain of the antibody construct binds to an epitope within MUC17 which corresponds to SEQ ID NO. 530 (aa 4131 to 4243 according to uniprot Q685J3 numbering).

[0027] Within said aspect, it is also envisaged in the context of the present invention to provide an antibody construct, wherein the first domain of the antibody construct binds to an epitope within MUC17 which corresponds to SEQ ID NO. 531 (aa 4244 to 4389 according to uniprot Q685J3 numbering).

[0028] Within said aspect, it is further envisaged in the context of the present invention to provide an antibody construct, wherein the first domain of the antibody construct binds to an epitope within MUC17 which corresponds to SEQ ID NO. 530 (aa 4131 to 4243 according to uniprot Q685J3 numbering) but not to an epitope within MUC17 which corresponds to SEQ ID NO. 531 (aa 4244 to 4389 according to uniprot Q685J3 numbering).

[0029] Within said aspect, it is also envisaged in the context of the present invention to provide an antibody construct, wherein the first domain of the antibody construct binds to an epitope within MUC17 which corresponds to SEQ ID NO. 532 (aa 4171 to 4390 according to uniprot Q685J3 numbering) or SEQ ID NO. 533 (aa 4184 to 4390 according to uniprot Q685J3 numbering) but not to an epitope within MUC17 which corresponds to SEQ ID NO. 534 (aa 4291 to 4390 according to uniprot Q685J3 numbering) or to an epitope within MUC17 which corresponds to SEQ ID NO. 535 (aa 4341 to 4390 according to uniprot Q685J3 numbering).

[0030] Within said aspect, it is further envisaged in the context of the present invention to provide an antibody construct, wherein the VH VL arrangement is characterized as 4 lambda 3. The nomenclature is known in the art.

[0031] Within said aspect, it is further envisaged in the context of the present invention to provide an antibody construct, wherein the ratio between cytotoxicity and binding affinity (EC₅₀/K_{D})*1000 is below 250, wherein the cytotoxicity is indicated in pM and determined in NUGC-4 cells as target cells and huPBMC as effector cells, and wherein the binding affinity is indicated in nM and determined by a surface plasmon resonance (SPR) assay, such as a Biacore assay. The factor 1000 has been introduced for better readability considering the different dimension between typical EC₅₀ and K_{D} values.

[0032] Within said aspect, it is also envisaged in the context of the present invention to provide an antibody construct, wherein the ratio between cytotoxicity and binding affinity (EC₅₀/K_{D})*1000 is below 125, wherein the cytotoxicity is indicated in pM and determined, e.g., in NUGC-4 cells as target cells and huPBMC as effector cells, and wherein the binding affinity is indicated in nM and determined, e.g., by a surface plasmon resonance-based assay.

[0033] Within said aspect, it is further envisaged in the context of the present invention to provide an antibody construct, wherein the ratio between cytotoxicity and binding affinity (EC₅₀/K_{D})*1000 is below 21, wherein the cytotoxicity is indicated in pM and determined, e.g., in NUGC-4 cells as target cells and huPBMC as effector cells, and wherein the binding affinity is indicated in nM and determined by a surface plasmon resonance-based assay. Preferably, cytotoxicity (EC₅₀) is <100 pM and the binding affinity (K_{D}) is <25 nM.

[0034] Within said aspect, it is also envisaged in the context of the present invention to provide an antibody construct, wherein the first binding domain comprises a VH region comprising CDR-H 1, CDR-H2 and CDR-H3 selected from:

(a) CDR-H1 as depicted in SEQ ID NO. 33, CDR-H2 as depicted in SEQ ID NO. 34 and CDR-H3 as depicted in SEQ ID NO. 35;
(b) CDR-H1 as depicted in SEQ ID NO. 44, CDR-H2 as depicted in SEQ ID NO. 45 and CDR-H3 as depicted in SEQ ID NO. 46;
(c) CDR-H1 as depicted in SEQ ID NO. 55, CDR-H2 as depicted in SEQ ID NO. 56 and CDR-H3 as depicted in SEQ ID NO. 57;
(d) CDR-H1 as depicted in SEQ ID NO. 66, CDR-H2 as depicted in SEQ ID NO. 67 and CDR-H3 as depicted in SEQ ID NO. 68;
(e) CDR-H1 as depicted in SEQ ID NO. 77, CDR-H2 as depicted in SEQ ID NO. 78 and CDR-H3 as depicted in SEQ ID NO. 79;
(f) CDR-H1 as depicted in SEQ ID NO. 88, CDR-H2 as depicted in SEQ ID NO. 89 and CDR-H3 as depicted in SEQ ID NO. 90;
(g) CDR-H1 as depicted in SEQ ID NO. 99, CDR-H2 as depicted in SEQ ID NO. 100 and CDR-H3 as depicted in SEQ ID NO. 101;
(h) CDR-H1 as depicted in SEQ ID NO. 110, CDR-H2 as depicted in SEQ ID NO. 111 and CDR-H3 as depicted in SEQ ID NO. 112;
(i) CDR-H1 as depicted in SEQ ID NO. 121, CDR-H2 as depicted in SEQ ID NO. 122 and CDR-H3 as depicted in SEQ ID NO. 123;
(j) CDR-H1 as depicted in SEQ ID NO. 132, CDR-H2 as depicted in SEQ ID NO. 133 and CDR-H3 as depicted in SEQ ID NO. 134;
(k) CDR-H1 as depicted in SEQ ID NO. 143, CDR-H2 as depicted in SEQ ID NO. 144 and CDR-H3 as depicted in SEQ ID NO. 145;
(l) CDR-H1 as depicted in SEQ ID NO. 154, CDR-H2 as depicted in SEQ ID NO. 155 and CDR-H3 as depicted in SEQ ID NO. 156;
(m) CDR-H1 as depicted in SEQ ID NO. 165, CDR-H2 as depicted in SEQ ID NO. 166 and CDR-H3 as depicted in SEQ ID NO. 167;
(n) CDR-H1 as depicted in SEQ ID NO. 176, CDR-H2 as depicted in SEQ ID NO. 177 and CDR-H3 as depicted in SEQ ID NO. 178;
(o) CDR-H1 as depicted in SEQ ID NO. 187, CDR-H2 as depicted in SEQ ID NO. 188 and CDR-H3 as depicted in SEQ ID NO. 189;
(p) CDR-H1 as depicted in SEQ ID NO. 198, CDR-H2 as depicted in SEQ ID NO. 199 and CDR-H3 as depicted in SEQ ID NO. 200;
(q) CDR-H1 as depicted in SEQ ID NO. 209, CDR-H2 as depicted in SEQ ID NO. 210 and CDR-H3 as depicted in SEQ ID NO. 211;
(r) CDR-H1 as depicted in SEQ ID NO. 220, CDR-H2 as depicted in SEQ ID NO. 221 and CDR-H3 as depicted in SEQ ID NO. 222;
(s) CDR-H1 as depicted in SEQ ID NO. 231, CDR-H2 as depicted in SEQ ID NO. 232 and CDR-H3 as depicted in SEQ ID NO. 233;
(t) CDR-H1 as depicted in SEQ ID NO. 242, CDR-H2 as depicted in SEQ ID NO. 243 and CDR-H3 as depicted in SEQ ID NO. 244;
(u) CDR-H1 as depicted in SEQ ID NO. 253, CDR-H2 as depicted in SEQ ID NO. 254 and CDR-H3 as depicted in SEQ ID NO. 255;
(v) CDR-H1 as depicted in SEQ ID NO. 264, CDR-H2 as depicted in SEQ ID NO. 265 and CDR-H3 as depicted in SEQ ID NO. 266;
(w) CDR-H1 as depicted in SEQ ID NO. 275, CDR-H2 as depicted in SEQ ID NO. 276 and CDR-H3 as depicted in SEQ ID NO. 276;
(x) CDR-H1 as depicted in SEQ ID NO. 286, CDR-H2 as depicted in SEQ ID NO. 287 and CDR-H3 as depicted in SEQ ID NO. 288;
(y) CDR-H1 as depicted in SEQ ID NO. 297, CDR-H2 as depicted in SEQ ID NO. 298 and CDR-H3 as depicted in SEQ ID NO. 299;
(z) CDR-H1 as depicted in SEQ ID NO. 308, CDR-H2 as depicted in SEQ ID NO. 309 and CDR-H3 as depicted in SEQ ID NO. 310;
(aa) CDR-H1 as depicted in SEQ ID NO. 319, CDR-H2 as depicted in SEQ ID NO. 320 and CDR-H3 as depicted in SEQ ID NO. 321;
(ab) CDR-H1 as depicted in SEQ ID NO. 330, CDR-H2 as depicted in SEQ ID NO. 331 and CDR-H3 as depicted in SEQ ID NO. 332;
(ac) CDR-H1 as depicted in SEQ ID NO. 341, CDR-H2 as depicted in SEQ ID NO. 342 and CDR-H3 as depicted in SEQ ID NO. 343;
(ad) CDR-H1 as depicted in SEQ ID NO. 352, CDR-H2 as depicted in SEQ ID NO. 353 and CDR-H3 as depicted in SEQ ID NO. 354;
(ae) CDR-H1 as depicted in SEQ ID NO. 363, CDR-H2 as depicted in SEQ ID NO. 364 and CDR-H3 as depicted in SEQ ID NO. 365;
(af) CDR-H1 as depicted in SEQ ID NO. 374, CDR-H2 as depicted in SEQ ID NO. 375 and CDR-H3 as depicted in SEQ ID NO. 376;
(ag) CDR-H1 as depicted in SEQ ID NO. 385, CDR-H2 as depicted in SEQ ID NO. 386 and CDR-H3 as depicted in SEQ ID NO. 386;
(ah) CDR-H1 as depicted in SEQ ID NO. 396, CDR-H2 as depicted in SEQ ID NO. 397 and CDR-H3 as depicted in SEQ ID NO. 398;
(ai) CDR-H1 as depicted in SEQ ID NO. 407, CDR-H2 as depicted in SEQ ID NO. 408 and CDR-H3 as depicted in SEQ ID NO. 409;
(aj) CDR-H1 as depicted in SEQ ID NO. 418, CDR-H2 as depicted in SEQ ID NO. 419 and CDR-H3 as depicted in SEQ ID NO. 420;
(ak) CDR-H1 as depicted in SEQ ID NO. 429, CDR-H2 as depicted in SEQ ID NO. 430 and CDR-H3 as depicted in SEQ ID NO. 431;
(al) CDR-H1 as depicted in SEQ ID NO. 440, CDR-H2 as depicted in SEQ ID NO. 441 and CDR-H3 as depicted in SEQ ID NO. 442;
(am) CDR-H1 as depicted in SEQ ID NO. 451, CDR-H2 as depicted in SEQ ID NO. 452 and CDR-H3 as depicted in SEQ ID NO. 453;
(an) CDR-H1 as depicted in SEQ ID NO. 462, CDR-H2 as depicted in SEQ ID NO. 463 and CDR-H3 as depicted in SEQ ID NO. 464;
(ao) CDR-H1 as depicted in SEQ ID NO. 473, CDR-H2 as depicted in SEQ ID NO. 474 and CDR-H3 as depicted in SEQ ID NO. 475;
(ap) CDR-H1 as depicted in SEQ ID NO. 484, CDR-H2 as depicted in SEQ ID NO. 485 and CDR-H3 as depicted in SEQ ID NO. 486;
(aq) CDR-H1 as depicted in SEQ ID NO. 495, CDR-H2 as depicted in SEQ ID NO. 496 and CDR-H3 as depicted in SEQ ID NO. 497;
(ar) CDR-H1 as depicted in SEQ ID NO. 506, CDR-H2 as depicted in SEQ ID NO. 507 and CDR-H3 as depicted in SEQ ID NO. 508; and
(as) CDR-H1 as depicted in SEQ ID NO. 517, CDR-H2 as depicted in SEQ ID NO. 518 and CDR-H3 as depicted in SEQ ID NO. 519; wherein preferred are
(c) CDR-H1 as depicted in SEQ ID NO. 55, CDR-H2 as depicted in SEQ ID NO. 56 and CDR-H3 as depicted in SEQ ID NO. 57;
(n) CDR-H1 as depicted in SEQ ID NO. 176, CDR-H2 as depicted in SEQ ID NO. 177 and CDR-H3 as depicted in SEQ ID NO. 178;
(ac) CDR-H1 as depicted in SEQ ID NO. 341, CDR-H2 as depicted in SEQ ID NO. 342 and CDR-H3 as depicted in SEQ ID NO. 343; and
(aj) CDR-H1 as depicted in SEQ ID NO. 418, CDR-H2 as depicted in SEQ ID NO. 419 and CDR-H3 as depicted in SEQ ID NO. 420.

[0035] Within said aspect, it is also envisaged in the context of the present invention to provide an antibody construct, wherein the first binding domain comprises a VL region comprising CDR-H1, CDR-L2 and CDR-L3 selected from:

(a) CDR-L1 as depicted in SEQ ID NO. 36, CDR-L2 as depicted in SEQ ID NO. 37 and CDR-L3 as depicted in SEQ ID NO. 38;
(b) CDR-L1 as depicted in SEQ ID NO. 47, CDR-L2 as depicted in SEQ ID NO. 48 and CDR-L3 as depicted in SEQ ID NO. 49;
(c) CDR-L1 as depicted in SEQ ID NO. 58, CDR-L2 as depicted in SEQ ID NO. 59 and CDR-L3 as depicted in SEQ ID NO. 60;
(d) CDR-L1 as depicted in SEQ ID NO. 69, CDR-L2 as depicted in SEQ ID NO. 70 and CDR-L3 as depicted in SEQ ID NO. 71;
(e) CDR-L1 as depicted in SEQ ID NO. 80, CDR-L2 as depicted in SEQ ID NO. 81 and CDR-L3 as depicted in SEQ ID NO. 82;
(f) CDR-L1 as depicted in SEQ ID NO. 91, CDR-L2 as depicted in SEQ ID NO. 92 and CDR-L3 as depicted in SEQ ID NO. 93;
(g) CDR-L1 as depicted in SEQ ID NO. 102, CDR-L2 as depicted in SEQ ID NO. 103 and CDR-L3 as depicted in SEQ ID NO. 104;
(h) CDR-L1 as depicted in SEQ ID NO. 113, CDR-L2 as depicted in SEQ ID NO. 114 and CDR-L3 as depicted in SEQ ID NO. 115;
(i) CDR-L1 as depicted in SEQ ID NO. 124, CDR-L2 as depicted in SEQ ID NO. 125 and CDR-L3 as depicted in SEQ ID NO. 126;
(j) CDR-L1 as depicted in SEQ ID NO. 135, CDR-L2 as depicted in SEQ ID NO. 136 and CDR-L3 as depicted in SEQ ID NO. 137;
(k) CDR-L1 as depicted in SEQ ID NO. 146, CDR-L2 as depicted in SEQ ID NO. 147 and CDR-L3 as depicted in SEQ ID NO. 148;
(l) CDR-L1 as depicted in SEQ ID NO. 157, CDR-L2 as depicted in SEQ ID NO. 158 and CDR-L3 as depicted in SEQ ID NO. 159;
(m) CDR-L1 as depicted in SEQ ID NO. 168, CDR-L2 as depicted in SEQ ID NO. 169 and CDR-L3 as depicted in SEQ ID NO. 170;
(n) CDR-L1 as depicted in SEQ ID NO. 179, CDR-L2 as depicted in SEQ ID NO. 180 and CDR-L3 as depicted in SEQ ID NO. 181;
(o) CDR-L1 as depicted in SEQ ID NO. 190, CDR-L2 as depicted in SEQ ID NO. 191 and CDR-L3 as depicted in SEQ ID NO. 192;
(p) CDR-L1 as depicted in SEQ ID NO. 201, CDR-L2 as depicted in SEQ ID NO. 202 and CDR-L3 as depicted in SEQ ID NO. 203;
(q) CDR-L1 as depicted in SEQ ID NO. 212, CDR-L2 as depicted in SEQ ID NO. 213 and CDR-L3 as depicted in SEQ ID NO. 214;
(r) CDR-L1 as depicted in SEQ ID NO. 223, CDR-L2 as depicted in SEQ ID NO. 224 and CDR-L3 as depicted in SEQ ID NO. 225;
(s) CDR-L1 as depicted in SEQ ID NO. 234, CDR-L2 as depicted in SEQ ID NO. 235 and CDR-L3 as depicted in SEQ ID NO. 236;
(t) CDR-L1 as depicted in SEQ ID NO. 245, CDR-L2 as depicted in SEQ ID NO. 246 and CDR-L3 as depicted in SEQ ID NO. 247;
(u) CDR-L1 as depicted in SEQ ID NO. 256, CDR-L2 as depicted in SEQ ID NO. 257 and CDR-L3 as depicted in SEQ ID NO. 258;
(v) CDR-L1 as depicted in SEQ ID NO. 267, CDR-L2 as depicted in SEQ ID NO. 268 and CDR-L3 as depicted in SEQ ID NO. 269;
(w) CDR-L1 as depicted in SEQ ID NO. 278, CDR-L2 as depicted in SEQ ID NO. 279 and CDR-L3 as depicted in SEQ ID NO. 280;
(x) CDR-L1 as depicted in SEQ ID NO. 289, CDR-L2 as depicted in SEQ ID NO. 290 and CDR-L3 as depicted in SEQ ID NO. 291;
(y) CDR-L1 as depicted in SEQ ID NO. 300, CDR-L2 as depicted in SEQ ID NO. 301 and CDR-L3 as depicted in SEQ ID NO. 302;
(z) CDR-L1 as depicted in SEQ ID NO. 311, CDR-L2 as depicted in SEQ ID NO. 312 and CDR-L3 as depicted in SEQ ID NO. 313;
(aa) CDR-L1 as depicted in SEQ ID NO. 322, CDR-L2 as depicted in SEQ ID NO. 323 and CDR-L3 as depicted in SEQ ID NO. 324;
(ab) CDR-L1 as depicted in SEQ ID NO. 333, CDR-L2 as depicted in SEQ ID NO. 334 and CDR-L3 as depicted in SEQ ID NO. 335;
(ac) CDR-L1 as depicted in SEQ ID NO. 344, CDR-L2 as depicted in SEQ ID NO. 345 and CDR-L3 as depicted in SEQ ID NO. 346;
(ad) CDR-L1 as depicted in SEQ ID NO. 355, CDR-L2 as depicted in SEQ ID NO. 356 and CDR-L3 as depicted in SEQ ID NO. 357;
(ae) CDR-L1 as depicted in SEQ ID NO. 366, CDR-L2 as depicted in SEQ ID NO. 367 and CDR-L3 as depicted in SEQ ID NO. 368;
(af) CDR-L1 as depicted in SEQ ID NO. 377, CDR-L2 as depicted in SEQ ID NO. 378 and CDR-L3 as depicted in SEQ ID NO. 379;
(ag) CDR-L1 as depicted in SEQ ID NO. 388, CDR-L2 as depicted in SEQ ID NO. 389 and CDR-L3 as depicted in SEQ ID NO. 390;
(ah) CDR-L1 as depicted in SEQ ID NO. 399, CDR-L2 as depicted in SEQ ID NO. 400 and CDR-L3 as depicted in SEQ ID NO. 401;
(ai) CDR-L1 as depicted in SEQ ID NO. 410, CDR-L2 as depicted in SEQ ID NO. 411 and CDR-L3 as depicted in SEQ ID NO. 412;
(aj) CDR-L1 as depicted in SEQ ID NO. 421, CDR-L2 as depicted in SEQ ID NO. 422 and CDR-L3 as depicted in SEQ ID NO. 423;
(ak) CDR-L1 as depicted in SEQ ID NO. 432, CDR-L2 as depicted in SEQ ID NO. 433 and CDR-L3 as depicted in SEQ ID NO. 434;
(al) CDR-L1 as depicted in SEQ ID NO. 443, CDR-L2 as depicted in SEQ ID NO. 444 and CDR-L3 as depicted in SEQ ID NO. 445;
(am) CDR-L1 as depicted in SEQ ID NO. 454, CDR-L2 as depicted in SEQ ID NO. 455 and CDR-L3 as depicted in SEQ ID NO. 456;
(an) CDR-L1 as depicted in SEQ ID NO. 465, CDR-L2 as depicted in SEQ ID NO. 466 and CDR-L3 as depicted in SEQ ID NO. 467;
(ao) CDR-L1 as depicted in SEQ ID NO. 476, CDR-L2 as depicted in SEQ ID NO. 477 and CDR-L3 as depicted in SEQ ID NO. 478;
(ap) CDR-L1 as depicted in SEQ ID NO. 487, CDR-L2 as depicted in SEQ ID NO. 488 and CDR-L3 as depicted in SEQ ID NO. 489;
(aq) CDR-L1 as depicted in SEQ ID NO. 498, CDR-L2 as depicted in SEQ ID NO. 499 and CDR-L3 as depicted in SEQ ID NO. 500;
(ar) CDR-L1 as depicted in SEQ ID NO. 509, CDR-L2 as depicted in SEQ ID NO. 510 and CDR-L3 as depicted in SEQ ID NO. 511; and
(as) CDR-L1 as depicted in SEQ ID NO. 520, CDR-L2 as depicted in SEQ ID NO. 521 and CDR-L3 as depicted in SEQ ID NO. 522; wherein preferred are
(c) CDR-L1 as depicted in SEQ ID NO. 58, CDR-L2 as depicted in SEQ ID NO. 59 and CDR-L3 as depicted in SEQ ID NO. 60;
(n) CDR-L1 as depicted in SEQ ID NO. 179, CDR-L2 as depicted in SEQ ID NO. 180 and CDR-L3 as depicted in SEQ ID NO. 181;
(ac) CDR-L1 as depicted in SEQ ID NO. 344, CDR-L2 as depicted in SEQ ID NO. 345 and CDR-L3 as depicted in SEQ ID NO. 346; and
(aj) CDR-L1 as depicted in SEQ ID NO. 421, CDR-L2 as depicted in SEQ ID NO. 422 and CDR-L3 as depicted in SEQ ID NO. 423.

[0036] Within said aspect, it is also envisaged in the context of the present invention to provide an antibody construct, wherein the first binding domain comprises a VL region and a VH region selected from the group consisting of:

(a) a VL region as depicted in SEQ ID NO. 40 and a VH region as depicted in SEQ ID NO. 39;
(b) a VL region as depicted in SEQ ID NO. 51 and a VH region as depicted in SEQ ID NO. 50;
(c) a VL region as depicted in SEQ ID NO. 62 and a VH region as depicted in SEQ ID NO. 61;
(d) a VL region as depicted in SEQ ID NO. 73 and a VH region as depicted in SEQ ID NO. 72;
(e) a VL region as depicted in SEQ ID NO. 84 and a VH region as depicted in SEQ ID NO. 83;
(f) a VL region as depicted in SEQ ID NO. 95 and a VH region as depicted in SEQ ID NO. 94;
(g) a VL region as depicted in SEQ ID NO. 106 and a VH region as depicted in SEQ ID NO. 105;
(h) a VL region as depicted in SEQ ID NO. 117 and a VH region as depicted in SEQ ID NO. 116;
(i) a VL region as depicted in SEQ ID NO. 128 and a VH region as depicted in SEQ ID NO. 127;
(j) a VL region as depicted in SEQ ID NO. 139 and a VH region as depicted in SEQ ID NO. 138;
(k) a VL region as depicted in SEQ ID NO. 150 and a VH region as depicted in SEQ ID NO. 149;
(l) a VL region as depicted in SEQ ID NO. 161 and a VH region as depicted in SEQ ID NO. 160;
(m) a VL region as depicted in SEQ ID NO. 172 and a VH region as depicted in SEQ ID NO. 171;
(n) a VL region as depicted in SEQ ID NO. 183 and a VH region as depicted in SEQ ID NO. 182;
(o) a VL region as depicted in SEQ ID NO. 194 and a VH region as depicted in SEQ ID NO. 193;
(p) a VL region as depicted in SEQ ID NO. 205 and a VH region as depicted in SEQ ID NO. 204;
(q) a VL region as depicted in SEQ ID NO. 216 and a VH region as depicted in SEQ ID NO. 215;
(r) a VL region as depicted in SEQ ID NO. 227 and a VH region as depicted in SEQ ID NO. 226;
(s) a VL region as depicted in SEQ ID NO. 238 and a VH region as depicted in SEQ ID NO. 237;
(t) a VL region as depicted in SEQ ID NO. 249 and a VH region as depicted in SEQ ID NO. 248;
(u) a VL region as depicted in SEQ ID NO. 260 and a VH region as depicted in SEQ ID NO. 259;
(v) a VL region as depicted in SEQ ID NO. 271 and a VH region as depicted in SEQ ID NO. 270;
(w) a VL region as depicted in SEQ ID NO. 282 and a VH region as depicted in SEQ ID NO. 281;
(x) a VL region as depicted in SEQ ID NO. 293 and a VH region as depicted in SEQ ID NO. 292;
(y) a VL region as depicted in SEQ ID NO. 304 and a VH region as depicted in SEQ ID NO. 303;
(z) a VL region as depicted in SEQ ID NO. 315 and a VH region as depicted in SEQ ID NO. 314;
(aa) a VL region as depicted in SEQ ID NO. 326 and a VH region as depicted in SEQ ID NO. 325;
(ab) a VL region as depicted in SEQ ID NO. 337 and a VH region as depicted in SEQ ID NO. 336;
(ac) a VL region as depicted in SEQ ID NO. 348 and a VH region as depicted in SEQ ID NO. 347;
(ad) a VL region as depicted in SEQ ID NO. 359 and a VH region as depicted in SEQ ID NO. 358;
(ae) a VL region as depicted in SEQ ID NO. 370 and a VH region as depicted in SEQ ID NO. 369;
(af) a VL region as depicted in SEQ ID NO. 381 and a VH region as depicted in SEQ ID NO. 380;
(ag) a VL region as depicted in SEQ ID NO. 392 and a VH region as depicted in SEQ ID NO. 391;
(ah) a VL region as depicted in SEQ ID NO. 403 and a VH region as depicted in SEQ ID NO. 402;
(ai) a VL region as depicted in SEQ ID NO. 414 and a VH region as depicted in SEQ ID NO. 413;
(aj) a VL region as depicted in SEQ ID NO. 425 and a VH region as depicted in SEQ ID NO. 424;
(ak) a VL region as depicted in SEQ ID NO. 436 and a VH region as depicted in SEQ ID NO. 435;
(al) a VL region as depicted in SEQ ID NO. 447 and a VH region as depicted in SEQ ID NO. 446;
(am) a VL region as depicted in SEQ ID NO. 458 and a VH region as depicted in SEQ ID NO. 457;
(an) a VL region as depicted in SEQ ID NO. 469 and a VH region as depicted in SEQ ID NO. 468;
(ao) a VL region as depicted in SEQ ID NO. 480 and a VH region as depicted in SEQ ID NO. 479;
(ap) a VL region as depicted in SEQ ID NO. 491 and a VH region as depicted in SEQ ID NO. 490;
(aq) a VL region as depicted in SEQ ID NO. 502 and a VH region as depicted in SEQ ID NO. 501;
(ar) a VL region as depicted in SEQ ID NO. 513 and a VH region as depicted in SEQ ID NO. 512; and
(as) a VL region as depicted in SEQ ID NO. 524 and a VH region as depicted in SEQ ID NO. 523.

[0037] Within said aspect, it is further envisaged in the context of the present invention to provide an antibody construct, wherein the antibody construct comprises a sequence selected from an amino acid sequence as depicted in any of SEQ ID NOs: 41, 52, 63, 74, 85, 96, 107, 118, 129, 140, 151, 162, 173, 184, 195, 206, 217, 228, 239, 250, 261, 272, 283, 294, 305, 316, 327, 338, 349, 360, 371, 382, 393, 404, 415, 426, 437, 448, 459, 470, 481, 492, 503, 514, and 525.

[0038] Within said aspect, it is also envisaged in the context of the present invention to provide an antibody construct, wherein the antibody construct comprises in an amino to carboxyl order:

(a) the first domain having an amino acid sequence selected from the group consisting of SEQ ID NOs: 41, 52, 63, 74, 85, 96, 107, 118, 129, 140, 151, 162, 173, 184, 195, 206, 217, 228, 239, 250, 261, 272, 283, 294, 305, 316, 327, 338, 349, 360, 371, 382, 393, 404, 415, 426, 437, 448, 459, 470, 481, 492, 503, 514, and 525;
(b) a peptide linker having an amino acid sequence selected from the group consisting of SEQ ID NOs: 1-3;
(c) the second domain having an amino acid sequence selected from the group consisting of SEQ ID NOs: 23, 25, 41, 43, 59, 61, 77, 79, 95, 97, 113, 115, 131, 133, 149, 151, 167, 169, 185 or 187 of WO 2008/119567 (SEQ ID NOs: 586-605 herein) or as depicted in SEQ ID NO: 15; and
(d) a peptide linker having an amino acid sequence selected from the group consisting of SEQ ID NOs: 1, 2, 3, 9, 10, 11 and 12;

[0039] Within said aspect, it is also envisaged in the context of the present invention to provide an antibody construct, wherein the antibody construct further comprises in addition to (a) to (d) an amino to carboxyl order:

(e) the first polypeptide monomer of the third domain having a polypeptide sequence selected from the group consisting of SEQ ID NOs: 17-24;
(f) a peptide linker having an amino acid sequence selected from the group consisting of SEQ ID NOs: 5, 6, 7 and 8; and
(g) the second polypeptide monomer of the third domain having a polypeptide sequence selected from the group consisting of SEQ ID NOs: 17-24.

[0040] Within said aspect, it is also envisaged in the context of the present invention to provide an antibody construct, having an amino acid sequence selected from the group consisting of SEQ ID NOs: 42, 43, 53, 54, 64, 65, 75, 76, 86, 87, 97, 98, 108, 109, 119, 120, 130, 131, 141, 142, 152, 153, 163, 164, 174, 175, 185, 186, 196, 197, 207, 208, 218, 219, 229, 230, 240, 241, 251, 252, 262, 263, 273, 274, 284, 285, 295, 296, 306, 307, 317, 318, 328, 329, 339, 340, 350, 351, 361, 362, 372, 373, 383, 384, 394, 395, 405, 406, 416, 417, 427, 428, 438, 439, 449, 450, 460, 461, 471, 472, 482, 483, 493, 494, 504, 505, 515, 516, 526 and 527.

[0041] In a second aspect, it is further envisaged in the context of the present invention to provide a polynucleotide encoding an antibody construct of the present invention.

[0042] In a third aspect, it is also envisaged in the context of the present invention to provide a vector comprising a polynucleotide of the present invention.

[0043] In a fourth aspect, it is further envisaged in the context of the present invention to provide a host cell transformed or transfected with the polynucleotide or with the vector of the present invention.

[0044] In a fifth aspect, it is also envisaged in the context of the present invention to provide a process for the production of an antibody construct of the present invention, said process comprising culturing a host cell of the present invention under conditions allowing the expression of the antibody construct and recovering the produced antibody construct from the culture.

[0045] In a sixth aspect, it is further envisaged in the context of the present invention to provide a pharmaceutical composition comprising an antibody construct of the present invention, or produced according to the process of the present invention.

[0046] Within said aspect, is also envisaged in the context of the present invention that the pharmaceutical composition is stable for at least four weeks at about −20° C.

[0047] It is further envisaged in the context of the present invention to provide the antibody construct of the present invention, or produced according to the process of the present invention, for use in the prevention, treatment or amelioration of a disease selected from a proliferative disease, a tumorous disease, cancer or an immunological disorder.

[0048] Within said aspect, it is also envisaged in the context of the present invention that the disease is a gastrointestinal cancer (e.g. gastric cancer, esophageal cancer, gastroesophageal cancer or colorectal cancer) or pancreatic cancer.

[0049] Within said aspect, it is also envisaged in the context of the present invention that the disease is a gastric cancer.

[0050] In a seventh aspect, it is further envisaged in the context of the present invention to provide a method for the treatment or amelioration of a proliferative disease, a tumorous disease, cancer, or an immunological disorder, comprising the step of administering to a subject in need thereof the antibody construct of the present invention, or produced according to the process of the present invention, wherein the disease preferably is gastrointestinal cancer or pancreatic cancer, most preferably gastric cancer.

[0051] In an eighth aspect, it is also envisaged in the context of the present invention to provide a kit comprising an antibody construct of the present invention, or produced according to the process of the present invention, a polynucleotide of the present invention, a vector of the present invention, and/or a host cell of the present invention.

[0052] In a ninth aspect, it is further envisaged in the context of the present invention to provide a method for the treatment or amelioration of gastrointestinal cancer, comprising the step of administering to a subject in need thereof a bispecific antibody construct directed against MUC17 and CD3.

[0053] In a tenth aspect, it is further envisaged in the context of the present invention to provide bispecific antibody construct directed against MUC17 and CD3 for use in the treatment or amelioration of gastrointestinal cancer.

### DESCRIPTION OF THE FIGURES

[0054] FIG. 1: FIG. 1 shows an epitope clustering of MUC17. Epitopes E1, E2, E3, E4, E5A and 5B as well as truncated versions of E2 (TR2, TR3, TR4 and TR5, respectively) are marked. Experiments on constructs wherein human MUC17 (brown/grey) was replaced by non-functional mouse MUC3 revealed the respective epitopes. 45 MUC17-scFc bispecific antibody constructs were identified which cover the epitope space E2, comprising the SEA domain

[0055] FIG. 2: MUC17 epitope mapping by on-cell binding of the MUC17-scFc bispecific antibody constructs against cells expressing human/mouse chimeric constructs. On-cell binding was assessed by fluorescence-activated cell sorting (FACS), where loss of binding to a chimeric construct indicates the respective (mutated) domain is essential for MUC17-scFc bispecific antibody constructs binding. For example, E2 shows loss of binding upon mutation. Hence, E2 is essential for binding for all four examined bispecific antibody constructs.

[0056] FIG. 3: MUC17 is expressed in gastric, pancreatic and colorectal cancer cell lines. MUC17 cell surface protein expression was determined by flow cytometry of live cells and are depicted as FACS readouts (A). MUC17 mRNA levels in cancer cell lines were determined by quantitative polymerase chain reaction (qPCR). Values are normalized to those of a constitutively expressed gene (B).

[0057] FIG. 4: Cytotoxicity assay on three different MUC17 bearing cell lines with different MUC17 expression (A: GSU, B: NUGC-4 and C: Ls174T). Tested constructs are 1=32-G6; 2=1-B6; 3=2-C2 and 4=8-B7. Construct 8-B7 is slightly favorable in terms of cytotoxicity.

[0058] FIG. 5: Soluble MUC17 protein (sMUCl7, aa 4131-4243 Uniprot) was added into TDCC assays at 0-1000 ng/ml and activity of the MUC17-scFc bispecific antibody constructs was assessed after 48 h incubation (target cells GSU (A) or NUGC-4 (B), 10:1 human T cells to target cells, readout by Steady Glo). Addition of sMUCl7 did not impact the cytotoxic activity of the bispecific antibody constructs.

[0059] FIG. 6: MUC17-scFc antibody construct 8-B7 inhibits tumor growth in a xenograft model of colorectal cancer. Female NOD/SCID mice were implanted with 2×10⁶ Ls174T colorectal cancer cells. On Day 15, 2×10⁷ expanded, activated T cells were administered by intraperitoneal (IP) injection. The MUC17-scFc antibody construct was dosed IP on Day 16 and Day 22. Tumor size was measured with calipers.

[0060] FIG. 7: Survey on preferred bispecific antibody constructs according to the present invention with group code (OPTimization library), molecule designation, epitope cluster to which the respective construct binds to, affinity (K_{D}) as per SPR in [nM], cytotoxic activity (EC₅₀) in NUGC-4 cells in [pM], the ratio (EC₅₀/K_{D})*1000 thereof, and the VH VL arrangement.

[0061] FIG. 8: The MUC17-scFc antibody construct 8-B7 has an extended half-life in cynomolgus monkey (A). Exposure levels are consistent with predicted exposures. (B) Cynomolgus monkeys (n=3 per group) were administered 100 mg/kg or 1000 mg/kg MUC17 HLE BiTE® at 0 h and 168 h. Serum was collected at the time points indicated and analyzed for the presence of MUC17 scFc bispecific antibody construct, using either an anti-CD3 antibody or an anti-MUC17 antibody based ELISA. The data were fit to a two-compartment model. The graph shows individual data (points) and the average value (line).

### DETAILED DESCRIPTION

[0062] In the context of the present invention, a bispecific antibody construct targeting specifically MUC17 associated with a malignancy is provided. To this end, first MUC17 is identified as a gene that is upregulated in gastric tumors relative to normal tissue expression. In this regard, it is shown that the MUC17 protein is expressed in 40-77% of gastric tumors according to immunohistochemistry methods common in the art. It is also demonstrated by flow cytometry that MUC17 protein is expressed on the cell surface of gastric cancer cell lines and esophageal cancer cell lines, in addition to some pancreatic cancer cell lines and colorectal cancer cell lines. It has even been shown that such expression is specifically high in gastric tumors in Chinese patients. Hence, MUC17 is identified as a valid target associated with gastrointestinal cancer, i.e. cancer of the stomach, small intestine and large intestine (colon), esophageal cancer and pancreatic cancer.

[0063] It is a surprising finding in the context of the present invention that the bispecific antibody constructs according to the present invention preferably target cancer cells, such as gastric and gastrointestinal cancer cells, bearing MUC17, and in contrast, do less target non-cancer cells. MUC17 is normally expressed on apical surface (i.e. located opposite of the base of the respective cells) of non-cancer intestinal epithelial cells and forms part of mucosal layer. However, MUC 17 is overexpressed in gastric and gastrointestinal cancer and, in such settings, not restricted to apical surface but also expressed on the non-apical surface. Without wanting to be bound by theory, MUC17 on the apical surface is considered to be less accessible to the bispecific antibody constructs according to the present invention while the MUC17 expressed on the non-apical surface in cancer cells is better accessible. Hence, the bispecific antibody constructs according to the present invention preferably target MUC17-associated cancer cells and less non-cancer cells. This has been surprisingly found when comparing good tolerability in healthy animals versus high anti-tumor efficacy in an in vivo caner model. In detail, although immunohistochemistry confirmed MUC17 expression on the apical surface of gastrointestinal tissue such as small intestine sampled from monkeys evaluated in an exploratory toxicology study, advantageously there were no histopathological changes in the tissues expressing MUC17. Good tolerability of non-cancer cells with respect to the bispecific antibody constructs according to the present invention is likewise confirmed in vitro. In contrast, intravenous treatment of tumor-bearing mice with a bispecific antibody construct according to the present invention results in statistically significant and dose-dependent tumor growth inhibition when compared with placebo-treated mice in the control group. Accordingly, the bispecific antibody constructs according to the present invention is preferably tolerated by the patient and features a preferably well manageable therapeutic window which has not been previously described for any MUC17 addressing agent.

[0064] Bispecific antibody constructs against the EGF-SEA-EGF region of the MUC17 protein are provided in the context of the present invention. Advantageously, targeting this region of the protein provides selectivity from the nearest family members (MUC3A, MUC3B, MUC12; ee.g., Hollingsworth and Swanson, Nat. Rev. Cancer 2004), and the ability to bind cell-membrane associated MUC17. MUC17, like other transmembrane mucins, contains a potential cleavage site within the SEA domain

[0065] Accordingly, bispecific antibody constructs that target the MUC17 EGF-SEA-EGF region and CD3 and have a single chain Fc format to extend half-life targetingare herewith envisaged. Advantageously, the bispecific antibody constructs of the present invention preferably have a high affinity for target cells bearing MUC17 target (single digit nM K_{D}) and potency (<50 pM EC50) to allow targeting of low or heterogeneous levels of MUC17 in tumor cells of interest.

[0066] It is envisaged that the bispecific antibody constructs according to the present inventionhave cross-reactivity to, for example, cynomolgus monkey MUC17 (in addition to human MUC17) to enable nonclinical toxicology studies. The significance of the sequence details of the EGF-SEA-EGF domain of cynomolgus monkey MUC17 is presented herein for the first time.

[0067] In the context of the present invention, it is envisaged that the bispecific antibody constructs exhibit binding affinity, potent cytotoxic activity, and are the most stablemap to the SEA domain

[0068] In the context of the present invention, it is envisaged that the bispecific antibody constructs have a cysteine clamp, i.e. intramolecular disulfide bond, in the target binder for improved stability.

[0069] It is envisaged in the context of the present invention that the bispecific antibody construct provided with a single chain Fc(scFc) as half-life extended (HLE) moiety and directed against MUC17, is intended for use in the treatment of gastrointestinal cancers, including gastric cancer, gastroesophageal cancer, esophageal cancer, pancreatic cancer and colorectal cancer.

[0070] Further, it is envisaged as optionally but advantageously in the context of the present invention that the scFc, i.e. HLE, antibody construct enables intravenous dosing that is administrated only once every week, once every two weeks, once every three weeks or even once every four weeks, or less frequently.

[0071] In the context of the present invention, a preferred epitope to be therapeutically targeted is identified by first eliminating the tandem repeats of MUC17 as they are highly glycosylated and repetitive in sequence. This results in, e.g., a 376 aa undefined region and a 177 aa EGF-like/SEA domain region. Advantageously, targeting the EGF-like/SEA domains allows selectivity from the nearest family members such as MUC3, cross-reactivity with cynomolgus monkey MUC17, and binding to cell membrane-associated MUC17. Subsequently we generated reagents and assays to evaluate binding, and T cell redirected lysis, activation and cytokine release. These assays were used to confirm that the preferred bispecific antibody constructs meet the predefined candidate product profile in terms of affinity, cytotoxic activity and construct stability.

[0072] In order to determine the epitope(s) of preferred bispecific antibody constructs directed to MUC17, epitope mapping wasconducted as described herein. Preferred bispecific antibody constructs are directed to the epitope E2 comprising the SEA domain. The E2 epitope comprises an amino acid (aa) sequence characterized herein as SEQ ID NO: 528. This essentially corresponds to aa 4171 to 4296 of MUC17 according to uniprot Q685J3 numbering. Generally, MUC17 aa numbering in the context of the present invention is always made or indented to be made in reference to the uniprot Q685J3 numbering of MUC17. On the contrary, bispecific antibody constructs targeting the E1 epitope of MUC17, i.e. an epitope N-terminal to the SEA domain (see FIG. 1), surprisingly show undesired cross-reactivity with MUC3A and MUC3B, which would result in off-target activity and, ultimately, an increased risk of side effects. Further, bispecific antibody constructs directed to epitopes E3 and E4 located C-terminal to the SEA domain (see FIG. 1) unexpectedly do not cross react to cynomolgus monkey MUC17. Hence, it is envisaged that the bispecific antibody constructs according to the present invention specifically and exclusively bind to the E2 epitope of MUC17.

[0073] Such preferred bispecific antibody constructs according to the present invention may be further specified based according to their structure or to their unique detailed epitope binding characteristics. Preferred bispecific antibody constructs according to the present invention may be determined by calculating a novel indicative ratio of cytotoxicity to affinity as provided herein. For example, said ratio (EC₅₀/K_{D})*1000 preferably is <(below) 250. Such a ratio is typically indicative for good binding to truncated variants of epitope E2, i.e. TR2 (trunk2: SEQ ID NO 532) and TR3 (trunk 3: SEQ ID NO: 533), while a ratio >(above) 250 is typically more indicate of good binding to TR2 but not to TR3. In detail, most preferred constructs typically bind to epitope cluster E2/E5A/in part 5B and/or TR2/TR3. They show, e.g., a (EC₅₀: K_{D})*1000 ratio below about 21 and belong to related sequence families (e.g. optimization (OPT) library nomenclature 4a, 4b, 5a and 10. Their VH/VL arrangement is preferably characterized herein as 4 lambda 3 or “413”) Such constructs are identified in the context of the present invention, for example, as 8-A7, 8-B7, 8-B8, 8-C7, 8-H8, 8-D7, 4-E7, 8-F9, 1-A6, 8-H9, 1-B6, 8-F11 and 5-H1. Also preferred are constructs which bind to epitope cluster E2/E5A/in part 5B and/or TR2/TR3 and which show a EC₅₀: K_{D} ratio below about 125 and belong to the sequence families (OPT library nomenclature) la, lc and 9. Their VH/VL arrangement is characterized as 3 lambda 3 or “313”. Such constructs are identified in the context of the present invention, for example, 2-D11, 8-E3, 32-G6, 2-C2, 9-C2, 1-B10, 4-B1, 4-F6, 4-G4, 4-A8, 4-B10, 4-H11, and 4-H2. Preferred, but less preferred than the two foregoing sequence families are the binders which bind to epitope cluster E2/in part E5A/in part 5B and/or TR2/in part TR3, and show a (EC₅₀/K_{D})*1000 ratio below about 1500, typically between 250 and 1450, and belong to the sequence families (OPT library nomenclature) 6, 7 and 8. Their VH/VL arrangement is characterized as 2 kappa 3 or “3k3”. Particularly preferred herein are the constructs 32-G6 (SEQ ID NO: 65), 1-B6 (SEQ ID NO: 483), 2-C2 (SEQ ID NO: 428) and 8-B7 (SEQ ID NO: 186). In the context of the present invention, affinity is generally measured by SPC such as BiacoreB analysis and results are typically given in nM. Cytotoxic activity is typically determined using NUGC-4 cells as MUC17 target cells and unstimulated human PBMCs as CD3 effector cells.

[0074] It is envisaged in the context of the present invention, that preferred bispecific antibody constructs do not only show a favorable ratio of cytotoxicity to affinity, but additionally show sufficient stability characteristics in order to facilitate practical handling in formulating, storing and administrating said constructs. Sufficient stability is, for example, characterized by a high monomer content (i.e. non-aggregated and/or non-associated, native molecule) after standard preparation, such as at least 65% as determined by preparative size exclusion chromatography (SEC), more preferably at least 70% and even more preferably at least 75%. Also, the turbidity measured, e.g., at 340 nm as optical absorption at a concentration of 2.5 mg/ml should, preferably, be equal to or lower than 0.025, more preferably 0.020, e.g., in order to conclude to the essential absence of undesired aggregates. Advantageously, high monomer content is maintained after incubation in stress conditions such as freeze/thaw or incubation at 37 or 40° C.

[0075] Thus, the present invention provides an antibody construct comprising:
[0076] a first domain which binds to MUC17,
[0077] a second domain which binds to an extracellular epitope of the human and the Macaca CD3c chain; and optionally
[0078] a third domain which comprises two polypeptide monomers, each comprising a hinge, a CH2 domain and a CH3 domain, wherein said two polypeptide monomers are fused to each other via a peptide linker.

[0079] In an embodiment, the present invention provides a bispecific antibody construct comprising all three such domains.

[0080] The term “antibody construct” refers to a molecule in which the structure and/or function is/are based on the structure and/or function of an antibody, e.g., of a full-length or whole immunoglobulin molecule. An antibody construct is hence capable of binding to its specific target or antigen and/or is/are drawn from the variable heavy chain (VH) and/or variable light chain (VL) domains of an antibody or fragment thereof. Furthermore, the domain which binds to its binding partner according to the present invention is understood herein as a binding domain of an antibody construct according to the invention. Typically, a binding domain according to the present invention comprises the minimum structural requirements of an antibody which allow for the target binding. This minimum requirement may e.g. be defined by the presence of at least the three light chain CDRs (i.e. CDR1, CDR2 and CDR3 of the VL region) and/or the three heavy chain CDRs (i.e. CDR1, CDR2 and CDR3 of the VH region), preferably of all six CDRs. An alternative approach to define the minimal structure requirements of an antibody is the definition of the epitope of the antibody within the structure of the specific target, respectively, the protein domain of the target protein composing the epitope region (epitope cluster) or by reference to a specific antibody competing with the epitope of the defined antibody. The antibodies on which the constructs according to the invention are based include for example monoclonal, recombinant, chimeric, deimmunized, humanized and human antibodies.

[0081] The binding domain of an antibody construct according to the invention may e.g. comprise the above referred groups of CDRs. Preferably, those CDRs are comprised in the framework of an antibody light chain variable region (VL) and an antibody heavy chain variable region (VH); however, it does not have to comprise both. Fd fragments, for example, have two VH regions and often retain some antigen-binding function of the intact antigen-binding domain. Additional examples for the format of antibody fragments, antibody variants or binding domains include (1) a Fab fragment, a monovalent fragment having the VL, VH, CL and CH1 domains; (2) a F(ab′)₂ fragment, a bivalent fragment having two Fab fragments linked by a disulfide bridge at the hinge region; (3) an Fd fragment having the two VH and CH1 domains; (4) an Fv fragment having the VL and VH domains of a single arm of an antibody, (5) a dAb fragment (Ward et al., (1989) Nature 341:544-546), which has a VH domain; (6) an isolated complementarity determining region (CDR), and (7) a single chain Fv (scFv), the latter being preferred (for example, derived from an scFV-library). Examples for embodiments of antibody constructs according to the invention are e.g. described in WO 00/006605, WO 2005/040220, WO 2008/119567, WO 2010/037838, WO 2013/026837, WO 2013/026833, US 2014/0308285, US 2014/0302037, WO 2014/144722, WO 2014/151910, and WO 2015/048272.

[0082] Also within the definition of “binding domain” or “domain which binds” are fragments of full-length antibodies, such as VH, VHH, VL, (s)dAb, Fv, Fd, Fab, Fab′, F(ab′)2 or “r IgG” (“half antibody”). Antibody constructs according to the invention may also comprise modified fragments of antibodies, also called antibody variants, such as scFv, di-scFv or bi(s)-scFv, scFv-Fc, scFv-zipper, scFab, Fab₂, Fab₃, diabodies, single chain diabodies, tandem diabodies (Tandab's), tandem di-scFv, tandem tri-scFv, “multibodies” such as triabodies or tetrabodies, and single domain antibodies such as nanobodies or single variable domain antibodies comprising merely one variable domain, which may be VHH, VH or VL, that specifically bind an antigen or epitope independently of other V regions or domains.

[0083] As used herein, the terms “single-chain Fv,” “single-chain antibodies” or “scFv” refer to single polypeptide chain antibody fragments that comprise the variable regions from both the heavy and light chains, but lack the constant regions. Generally, a single-chain antibody further comprises a polypeptide linker between the VH and VL domains which enables it to form the desired structure which would allow for antigen binding. Single chain antibodies are discussed in detail by Pluckthun in The Pharmacology of Monoclonal Antibodies, vol. 113, Rosenburg and Moore eds. Springer-Verlag, New York, pp. 269-315 (1994). Various methods of generating single chain antibodies are known, including those described in U.S. Pat. Nos. 4,694,778 and 5,260,203; International Patent Application Publication No. WO 88/01649; Bird (1988) Science 242:423-442; Huston et al. (1988) Proc. Natl. Acad. Sci. USA 85:5879-5883; Ward et al. (1989) Nature 334:54454; Skerra et al. (1988) Science 242:1038-1041. In specific embodiments, single-chain antibodies can also be bispecific, multispecific, human, and/or humanized and/or synthetic.

[0084] Furthermore, the definition of the term “antibody construct” includes monovalent, bivalent and polyvalent/multivalent constructs and, thus, bispecific constructs, specifically binding to only two antigenic structure, as well as polyspecific/multispecific constructs, which specifically bind more than two antigenic structures, e.g. three, four or more, through distinct binding domains. Moreover, the definition of the term “antibody construct” includes molecules consisting of only one polypeptide chain as well as molecules consisting of more than one polypeptide chain, which chains can be either identical (homodimers, homotrimers or homo oligomers) or different (heterodimer, heterotrimer or heterooligomer). Examples for the above identified antibodies and variants or derivatives thereof are described inter alia in Harlow and Lane, Antibodies a laboratory manual, CSHL Press (1988) and Using Antibodies: a laboratory manual, CSHL Press (1999), Kontermann and Dübel, Antibody Engineering, Springer, 2nd ed. 2010 and Little, Recombinant Antibodies for Immunotherapy, Cambridge University Press 2009.

[0085] The term “bispecific” as used herein refers to an antibody construct which is “at least bispecific”, i.e., it comprises at least a first binding domain and a second binding domain, wherein the first binding domain binds to one antigen or target (here: MUC17MUC17), and the second binding domain binds to another antigen or target (here: CD3). Accordingly, antibody constructs according to the invention comprise specificities for at least two different antigens or targets. For example, the first domain does preferably not bind to an extracellular epitope of CD3□ of one or more of the species as described herein. The term “target cell surface antigen” refers to an antigenic structure expressed by a cell and which is present at the cell surface such that it is accessible for an antibody construct as described herein. It may be a protein, preferably the extracellular portion of a protein, or a carbohydrate structure, preferably a carbohydrate structure of a protein, such as a glycoprotein. It is preferably a tumor antigen. The term “bispecific antibody construct” of the invention also encompasses multispecific antibody constructs such as trispecific antibody constructs, the latter ones including three binding domains, or constructs having more than three (e.g. four, five . . . ) specificities.

[0086] Given that the antibody constructs according to the invention are (at least) bispecific, they do not occur naturally and they are markedly different from naturally occurring products. A “bispecific” antibody construct or immunoglobulin is hence an artificial hybrid antibody or immunoglobulin having at least two distinct binding sides with different specificities. Bispecific antibody constructs can be produced by a variety of methods including fusion of hybridomas or linking of Fab′ fragments. See, e.g., Songsivilai & Lachmann, Clin. Exp. Immunol. 79:315-321 (1990).

[0087] The at least two binding domains and the variable domains (VH/VL) of the antibody construct of the present invention may or may not comprise peptide linkers (spacer peptides). The term “peptide linker” comprises in accordance with the present invention an amino acid sequence by which the amino acid sequences of one (variable and/or binding) domain and another (variable and/or binding) domain of the antibody construct of the invention are linked with each other. The peptide linkers can also be used to fuse the third domain to the other domains of the antibody construct of the invention. An essential technical feature of such peptide linker is that it does not comprise any polymerization activity. Among the suitable peptide linkers are those described in U.S. Pat. Nos. 4,751,180 and 4,935,233 or WO 88/09344. The peptide linkers can also be used to attach other domains or modules or regions (such as half-life extending domains) to the antibody construct of the invention.

[0088] The antibody constructs of the present invention are preferably “in vitro generated antibody constructs”. This term refers to an antibody construct according to the above definition where all or part of the variable region (e.g., at least one CDR) is generated in a non-immune cell selection, e.g., an in vitro phage display, protein chip or any other method in which candidate sequences can be tested for their ability to bind to an antigen. This term thus preferably excludes sequences generated solely by genomic rearrangement in an immune cell in an animal A “recombinant antibody” is an antibody made through the use of recombinant DNA technology or genetic engineering.

[0089] The term “monoclonal antibody” (mAb) or monoclonal antibody construct as used herein refers to an antibody obtained from a population of substantially homogeneous antibodies, i.e., the individual antibodies comprising the population are identical except for possible naturally occurring mutations and/or post-translation modifications (e.g., isomerizations, amidations) that may be present in minor amounts. Monoclonal antibodies are highly specific, being directed against a single antigenic side or determinant on the antigen, in contrast to conventional (polyclonal) antibody preparations which typically include different antibodies directed against different determinants (or epitopes). In addition to their specificity, the monoclonal antibodies are advantageous in that they are synthesized by the hybridoma culture, hence uncontaminated by other immunoglobulins. The modifier “monoclonal” indicates the character of the antibody as being obtained from a substantially homogeneous population of antibodies, and is not to be construed as requiring production of the antibody by any particular method.

[0090] For the preparation of monoclonal antibodies, any technique providing antibodies produced by continuous cell line cultures can be used. For example, monoclonal antibodies to be used may be made by the hybridoma method first described by Koehler et al., Nature, 256: 495 (1975), or may be made by recombinant DNA methods (see, e.g., U.S. Pat. No. 4,816,567). Examples for further techniques to produce human monoclonal antibodies include the trioma technique, the human B-cell hybridoma technique (Kozbor, Immunology Today 4 (1983), 72) and the EBV-hybridoma technique (Cole et al., Monoclonal Antibodies and Cancer Therapy, Alan R. Liss, Inc. (1985), 77-96).

[0091] Hybridomas can then be screened using standard methods, such as enzyme-linked immunosorbent assay (ELISA) and surface plasmon resonance analysis, e.g. Biacore™ to identify one or more hybridomas that produce an antibody that specifically binds with a specified antigen. Any form of the relevant antigen may be used as the immunogen, e.g., recombinant antigen, naturally occurring forms, any variants or fragments thereof, as well as an antigenic peptide thereof. Surface plasmon resonance as employed in the Biacore system can be used to increase the efficiency of phage antibodies which bind to an epitope of a target cell surface antigen (Schier, Human Antibodies Hybridomas 7 (1996), 97-105; Malmborg, J. Immunol. Methods 183 (1995), 7-13).

[0092] Another exemplary method of making monoclonal antibodies includes screening protein expression libraries, e.g., phage display or ribosome display libraries. Phage display is described, for example, in Ladner et al., U.S. Pat. No. 5,223,409; Smith (1985) Science 228:1315-1317, Clackson et al., Nature, 352: 624-628 (1991) and Marks et al., J. Mol. Biol., 222: 581-597 (1991).

[0093] In addition to the use of display libraries, the relevant antigen can be used to immunize a non-human animal, e.g., a rodent (such as a mouse, hamster, rabbit or rat). In one embodiment, the non-human animal includes at least a part of a human immunoglobulin gene. For example, it is possible to engineer mouse strains deficient in mouse antibody production with large fragments of the human Ig (immunoglobulin) loci. Using the hybridoma technology, antigen-specific monoclonal antibodies derived from the genes with the desired specificity may be produced and selected. See, e.g., XENOMOUSE™, Green et al. (1994) Nature Genetics 7:13-21, US 2003-0070185, WO 96/34096, and WO 96/33735.

[0094] A monoclonal antibody can also be obtained from a non-human animal, and then modified, e.g., humanized, deimmunized, rendered chimeric etc., using recombinant DNA techniques known in the art. Examples of modified antibody constructs include humanized variants of non-human antibodies, “affinity matured” antibodies (see, e.g. Hawkins et al. J. Mol. Biol. 254, 889-896 (1992) and Lowman et al., Biochemistry 30, 10832-10837 (1991)) and antibody mutants with altered effector function(s) (see, e.g., U.S. Pat. No. 5,648,260, Kontermann and Dübel (2010), loc. cit. and Little (2009), loc. cit.).

[0095] In immunology, affinity maturation is the process by which B cells produce antibodies with increased affinity for antigen during the course of an immune response. With repeated exposures to the same antigen, a host will produce antibodies of successively greater affinities. Like the natural prototype, the in vitro affinity maturation is based on the principles of mutation and selection. The in vitro affinity maturation has successfully been used to optimize antibodies, antibody constructs, and antibody fragments. Random mutations inside the CDRs are introduced using radiation, chemical mutagens or error-prone PCR. In addition, the genetic diversity can be increased by chain shuffling. Two or three rounds of mutation and selection using display methods like phage display usually results in antibody fragments with affinities in the low nanomolar range.

[0096] A preferred type of an amino acid substitutional variation of the antibody constructs involves substituting one or more hypervariable region residues of a parent antibody (e. g. a humanized or human antibody). Generally, the resulting variant(s) selected for further development will have improved biological properties relative to the parent antibody from which they are generated. A convenient way for generating such substitutional variants involves affinity maturation using phage display. Briefly, several hypervariable region sides (e. g. 6-7 sides) are mutated to generate all possible amino acid substitutions at each side. The antibody variants thus generated are displayed in a monovalent fashion from filamentous phage particles as fusions to the gene III product of M13 packaged within each particle. The phage-displayed variants are then screened for their biological activity (e. g. binding affinity) as herein disclosed. In order to identify candidate hypervariable region sides for modification, alanine scanning mutagenesis can be performed to identify hypervariable region residues contributing significantly to antigen binding. Alternatively, or additionally, it may be beneficial to analyze a crystal structure of the antigen-antibody complex to identify contact points between the binding domain and, e.g., human MUC17. Such contact residues and neighbouring residues are candidates for substitution according to the techniques elaborated herein. Once such variants are generated, the panel of variants is subjected to screening as described herein and antibodies with superior properties in one or more relevant assays may be selected for further development.

[0097] The monoclonal antibodies and antibody constructs of the present invention specifically include “chimeric” antibodies (immunoglobulins) in which a portion of the heavy and/or light chain is identical with or homologous to corresponding sequences in antibodies derived from a particular species or belonging to a particular antibody class or subclass, while the remainder of the chain(s) is/are identical with or homologous to corresponding sequences in antibodies derived from another species or belonging to another antibody class or subclass, as well as fragments of such antibodies, so long as they exhibit the desired biological activity (U.S. Pat. No. 4,816,567; Morrison et al., Proc. Natl. Acad. Sci. USA, 81: 6851-6855 (1984)). Chimeric antibodies of interest herein include “primitized” antibodies comprising variable domain antigen-binding sequences derived from a non-human primate (e.g., Old World Monkey, Ape etc.) and human constant region sequences. A variety of approaches for making chimeric antibodies have been described. See e.g., Morrison et al., Proc. Natl. Acad. ScL U.S.A. 81:6851, 1985; Takeda et al., Nature 314:452, 1985, Cabilly et al., U.S. Pat. No. 4,816,567; Boss et al., U.S. Pat. No. 4,816,397; Tanaguchi et al., EP 0171496; EP 0173494; and GB 2177096.

[0098] An antibody, antibody construct, antibody fragment or antibody variant may also be modified by specific deletion of human T cell epitopes (a method called “deimmunization”) by the methods disclosed for example in WO 98/52976 or WO 00/34317. Briefly, the heavy and light chain variable domains of an antibody can be analyzed for peptides that bind to MHC class II; these peptides represent potential T cell epitopes (as defined in WO 98/52976 and WO 00/34317). For detection of potential T cell epitopes, a computer modeling approach termed “peptide threading” can be applied, and in addition a database of human MHC class II binding peptides can be searched for motifs present in the VH and VL sequences, as described in WO 98/52976 and WO 00/34317. These motifs bind to any of the 18 major MHC class II DR allotypes, and thus constitute potential T cell epitopes. Potential T cell epitopes detected can be eliminated by substituting small numbers of amino acid residues in the variable domains, or preferably, by single amino acid substitutions. Typically, conservative substitutions are made. Often, but not exclusively, an amino acid common to a position in human germline antibody sequences may be used. Human germline sequences are disclosed e.g. in Tomlinson, et al. (1992) J. MoI. Biol. 227:776-798; Cook, G. P. et al. (1995) Immunol. Today Vol. 16 (5): 237-242; and Tomlinson et al. (1995) EMBO J. 14: 14:4628-4638. The V BASE directory provides a comprehensive directory of human immunoglobulin variable region sequences (compiled by Tomlinson, L A. et al. MRC Centre for Protein Engineering, Cambridge, UK). These sequences can be used as a source of human sequence, e.g., for framework regions and CDRs. Consensus human framework regions can also be used, for example as described in U.S. Pat. No. 6,300,064.

[0099] “Humanized” antibodies, antibody constructs, variants or fragments thereof (such as Fv, Fab, Fab′, F(ab′)2 or other antigen-binding subsequences of antibodies) are antibodies or immunoglobulins of mostly human sequences, which contain (a) minimal sequence(s) derived from non-human immunoglobulin. For the most part, humanized antibodies are human immunoglobulins (recipient antibody) in which residues from a hypervariable region (also CDR) of the recipient are replaced by residues from a hypervariable region of a non-human (e.g., rodent) species (donor antibody) such as mouse, rat, hamster or rabbit having the desired specificity, affinity, and capacity. In some instances, Fv framework region (FR) residues of the human immunoglobulin are replaced by corresponding non-human residues. Furthermore, “humanized antibodies” as used herein may also comprise residues which are found neither in the recipient antibody nor the donor antibody. These modifications are made to further refine and optimize antibody performance The humanized antibody may also comprise at least a portion of an immunoglobulin constant region (Fc), typically that of a human immunoglobulin. For further details, see Jones et al., Nature, 321: 522-525 (1986); Reichmann et al., Nature, 332: 323-329 (1988); and Presta, Curr. Op. Struct. Biol., 2: 593-596 (1992).

[0100] Humanized antibodies or fragments thereof can be generated by replacing sequences of the Fv variable domain that are not directly involved in antigen binding with equivalent sequences from human Fv variable domains. Exemplary methods for generating humanized antibodies or fragments thereof are provided by Morrison (1985) Science 229:1202-1207; by Oi et al. (1986) BioTechniques 4:214; and by U.S. Pat. Nos. 5,585,089; 5,693,761; 5,693,762; 5,859,205; and 6,407,213. Those methods include isolating, manipulating, and expressing the nucleic acid sequences that encode all or part of immunoglobulin Fv variable domains from at least one of a heavy or light chain. Such nucleic acids may be obtained from a hybridoma producing an antibody against a predetermined target, as described above, as well as from other sources. The recombinant DNA encoding the humanized antibody molecule can then be cloned into an appropriate expression vector.

[0101] Humanized antibodies may also be produced using transgenic animals such as mice that express human heavy and light chain genes, but are incapable of expressing the endogenous mouse immunoglobulin heavy and light chain genes. Winter describes an exemplary CDR grafting method that may be used to prepare the humanized antibodies described herein (U.S. Pat. No. 5,225,539). All of the CDRs of a particular human antibody may be replaced with at least a portion of a non-human CDR, or only some of the CDRs may be replaced with non-human CDRs. It is only necessary to replace the number of CDRs required for binding of the humanized antibody to a predetermined antigen.

[0102] A humanized antibody can be optimized by the introduction of conservative substitutions, consensus sequence substitutions, germline substitutions and/or back mutations. Such altered immunoglobulin molecules can be made by any of several techniques known in the art, (e.g., Teng et al., Proc. Natl. Acad. Sci. U.S.A., 80: 7308-7312, 1983; Kozbor et al., Immunology Today, 4: 7279, 1983; Olsson et al., Meth. Enzymol., 92: 3-16, 1982, and EP 239 400).

[0103] The term “human antibody”, “human antibody construct” and “human binding domain” includes antibodies, antibody constructs and binding domains having antibody regions such as variable and constant regions or domains which correspond substantially to human germline immunoglobulin sequences known in the art, including, for example, those described by Kabat et al. (1991) (loc. cit.). The human antibodies, antibody constructs or binding domains of the invention may include amino acid residues not encoded by human germline immunoglobulin sequences (e.g., mutations introduced by random or side-specific mutagenesis in vitro or by somatic mutation in vivo), for example in the CDRs, and in particular, in CDR3. The human antibodies, antibody constructs or binding domains can have at least one, two, three, four, five, or more positions replaced with an amino acid residue that is not encoded by the human germline immunoglobulin sequence. The definition of human antibodies, antibody constructs and binding domains as used herein also contemplates fully human antibodies, which include only non-artificially and/or genetically altered human sequences of antibodies as those can be derived by using technologies or systems such as the Xenomouse. Preferably, a “fully human antibody” does not include amino acid residues not encoded by human germline immunoglobulin sequences.

[0104] In some embodiments, the antibody constructs of the invention are “isolated” or “substantially pure” antibody constructs. “Isolated” or “substantially pure”, when used to describe the antibody constructs disclosed herein, means an antibody construct that has been identified, separated and/or recovered from a component of its production environment. Preferably, the antibody construct is free or substantially free of association with all other components from its production environment. Contaminant components of its production environment, such as that resulting from recombinant transfected cells, are materials that would typically interfere with diagnostic or therapeutic uses for the polypeptide, and may include enzymes, hormones, and other proteinaceous or non-proteinaceous solutes. The antibody constructs may e.g. constitute at least about 5%, or at least about 50% by weight of the total protein in a given sample. It is understood that the isolated protein may constitute from 5% to 99.9% by weight of the total protein content, depending on the circumstances. The polypeptide may be made at a significantly higher concentration through the use of an inducible promoter or high expression promoter, such that it is made at increased concentration levels. The definition includes the production of an antibody construct in a wide variety of organisms and/or host cells that are known in the art. In preferred embodiments, the antibody construct will be purified (1) to a degree sufficient to obtain at least 15 residues of N-terminal or internal amino acid sequence by use of a spinning cup sequenator, or (2) to homogeneity by SDS-PAGE under non-reducing or reducing conditions using Coomassie blue or, preferably, silver stain. Ordinarily, however, an isolated antibody construct will be prepared by at least one purification step.

[0105] The term “binding domain” characterizes in connection with the present invention a domain which (specifically) binds to/interacts with/recognizes a given target epitope or a given target side on the target molecules (antigens), here: MUC17 and CD3, respectively. The structure and function of the first binding domain (recognizing MUC17), and preferably also the structure and/or function of the second binding domain (recognizing CD3), is/are based on the structure and/or function of an antibody, e.g. of a full-length or whole immunoglobulin molecule, and/or is/are drawn from the variable heavy chain (VH) and/or variable light chain (VL) domains of an antibody or fragment thereof. Preferably the first binding domain is characterized by the presence of three light chain CDRs (i.e. CDR1, CDR2 and CDR3 of the VL region) and/or three heavy chain CDRs (i.e. CDR1, CDR2 and CDR3 of the VH region). The second binding domain preferably also comprises the minimum structural requirements of an antibody which allow for the target binding. More preferably, the second binding domain comprises at least three light chain CDRs (i.e. CDR1, CDR2 and CDR3 of the VL region) and/or three heavy chain CDRs (i.e. CDR1, CDR2 and CDR3 of the VH region). It is envisaged that the first and/or second binding domain is produced by or obtainable by phage-display or library screening methods rather than by grafting CDR sequences from a pre-existing (monoclonal) antibody into a scaffold.

[0106] According to the present invention, binding domains are in the form of one or more polypeptides. Such polypeptides may include proteinaceous parts and non-proteinaceous parts (e.g. chemical linkers or chemical cross-linking agents such as glutaraldehyde). Proteins (including fragments thereof, preferably biologically active fragments, and peptides, usually having less than 30 amino acids) comprise two or more amino acids coupled to each other via a covalent peptide bond (resulting in a chain of amino acids).

[0107] The term “polypeptide” as used herein describes a group of molecules, which usually consist of more than 30 amino acids. Polypeptides may further form multimers such as dimers, trimers and higher oligomers, i.e., consisting of more than one polypeptide molecule. Polypeptide molecules forming such dimers, trimers etc. may be identical or non-identical. The corresponding higher order structures of such multimers are, consequently, termed homo- or heterodimers, homo- or heterotrimers etc. An example for a heteromultimer is an antibody molecule, which, in its naturally occurring form, consists of two identical light polypeptide chains and two identical heavy polypeptide chains. The terms “peptide”, “polypeptide” and “protein” also refer to naturally modified peptides/polypeptides/proteins wherein the modification is effected e.g. by post-translational modifications like glycosylation, acetylation, phosphorylation and the like. A “peptide”, “polypeptide” or “protein” when referred to herein may also be chemically modified such as pegylated. Such modifications are well known in the art and described herein below.

[0108] Preferably the binding domain which binds to MUC17 and/or the binding domain which binds to CD3E is/are human binding domains. Antibodies and antibody constructs comprising at least one human binding domain avoid some of the problems associated with antibodies or antibody constructs that possess non-human such as rodent (e.g. murine, rat, hamster or rabbit) variable and/or constant regions. The presence of such rodent derived proteins can lead to the rapid clearance of the antibodies or antibody constructs or can lead to the generation of an immune response against the antibody or antibody construct by a patient. In order to avoid the use of rodent derived antibodies or antibody constructs, human or fully human antibodies/antibody constructs can be generated through the introduction of human antibody function into a rodent so that the rodent produces fully human antibodies.

[0109] The ability to clone and reconstruct megabase-sized human loci in yeast artificial chromosomes YACs and to introduce them into the mouse germline provides a powerful approach to elucidating the functional components of very large or crudely mapped loci as well as generating useful models of human disease. Furthermore, the use of such technology for substitution of mouse loci with their human equivalents could provide unique insights into the expression and regulation of human gene products during development, their communication with other systems, and their involvement in disease induction and progression.

[0110] An important practical application of such a strategy is the “humanization” of the mouse humoral immune system. Introduction of human immunoglobulin (Ig) loci into mice in which the endogenous Ig genes have been inactivated offers the opportunity to study the mechanisms underlying programmed expression and assembly of antibodies as well as their role in B-cell development. Furthermore, such a strategy could provide an ideal source for production of fully human monoclonal antibodies (mAbs)—an important milestone towards fulfilling the promise of antibody therapy in human disease. Fully human antibodies or antibody constructs are expected to minimize the immunogenic and allergic responses intrinsic to mouse or mouse-derivatized mAbs and thus to increase the efficacy and safety of the administered antibodies/antibody constructs. The use of fully human antibodies or antibody constructs can be expected to provide a substantial advantage in the treatment of chronic and recurring human diseases, such as inflammation, autoimmunity, and cancer, which require repeated compound administrations.

[0111] One approach towards this goal was to engineer mouse strains deficient in mouse antibody production with large fragments of the human Ig loci in anticipation that such mice would produce a large repertoire of human antibodies in the absence of mouse antibodies. Large human Ig fragments would preserve the large variable gene diversity as well as the proper regulation of antibody production and expression. By exploiting the mouse machinery for antibody diversification and selection and the lack of immunological tolerance to human proteins, the reproduced human antibody repertoire in these mouse strains should yield high affinity antibodies against any antigen of interest, including human antigens. Using the hybridoma technology, antigen-specific human mAbs with the desired specificity could be readily produced and selected. This general strategy was demonstrated in connection with the generation of the first XenoMouse mouse strains (see Green et al. Nature Genetics 7:13-21 (1994)). The XenoMouse strains were engineered with YACs containing 245 kb and 190 kb-sized germline configuration fragments of the human heavy chain locus and kappa light chain locus, respectively, which contained core variable and constant region sequences. The human Ig containing YACs proved to be compatible with the mouse system for both rearrangement and expression of antibodies and were capable of substituting for the inactivated mouse Ig genes. This was demonstrated by their ability to induce B cell development, to produce an adult-like human repertoire of fully human antibodies, and to generate antigen-specific human mAbs. These results also suggested that introduction of larger portions of the human Ig loci containing greater numbers of V genes, additional regulatory elements, and human Ig constant regions may recapitulate substantially the full repertoire that is characteristic of the human humoral response to infection and immunization. The work of Green et al. was recently extended to the introduction of greater than approximately 80% of the human antibody repertoire through introduction of megabase sized, germline configuration YAC fragments of the human heavy chain loci and kappa light chain loci, respectively. See Mendez et al. Nature Genetics 15:146-156 (1997) and U.S. patent application Ser. No. 08/759,620.

[0112] The production of the XenoMouseanimals is further discussed and delineated in U.S. patent application Ser. No. 07/466,008, Ser. No. 07/610,515, Ser. No. 07/919,297, Ser. No. 07/922,649, Ser. No. 08/031,801, Ser. No. 08/112,848, Ser. No. 08/234,145, Ser. No. 08/376,279, Ser. No. 08/430,938, Ser. No. 08/464,584, Ser. No. 08/464,582, Ser. No. 08/463,191, Ser. No. 08/462,837, Ser. No. 08/486,853, Ser. No. 08/486,857, Ser. No. 08/486,859, Ser. No. 08/462,513, Ser. No. 08/724,752, and Ser. No. 08/759,620; and U.S. Pat. Nos. 6,162,963; 6,150,584; 6,114,598; 6,075,181, and 5,939,598 and Japanese Patent Nos. 3 068 180 B2, 3 068 506 B2, and 3 068 507 B2. See also Mendez et al. Nature Genetics 15:146-156 (1997) and Green and Jakobovits J. Exp. Med. 188:483-495 (1998), EP 0 463 151 B1, WO 94/02602, WO 96/34096, WO 98/24893, WO 00/76310, and WO 03/47336.

[0113] In an alternative approach, others, including GenPharm International, Inc., have utilized a “minilocus” approach. In the minilocus approach, an exogenous Ig locus is mimicked through the inclusion of pieces (individual genes) from the Ig locus. Thus, one or more VH genes, one or more DH genes, one or more JH genes, a mu constant region, and a second constant region (preferably a gamma constant region) are formed into a construct for insertion into an animal. This approach is described in U.S. Pat. No. 5,545,807 to Surani et al. and U.S. Pat. Nos. 5,545,806; 5,625,825; 5,625,126; 5,633,425; 5,661,016; 5,770,429; 5,789,650; 5,814,318; 5,877,397; 5,874,299; and 6,255,458 each to Lonberg and Kay, U.S. Pat. Nos. 5,591,669 and 6,023.010 to Krimpenfort and Berns, U.S. Pat. Nos. 5,612,205; 5,721,367; and U.S. Pat. No. 5,789,215 to Berns et al., and U.S. Pat. No. 5,643,763 to Choi and Dunn, and GenPharm International U.S. patent application Ser. No. 07/574,748, Ser. No. 07/575,962, Ser. No. 07/810,279, Ser. No. 07/853,408, Ser. No. 07/904,068, Ser. No. 07/990,860, Ser. No. 08/053,131, Ser. No. 08/096,762, Ser. No. 08/155,301, Ser. No. 08/161,739, Ser. No. 08/165,699, Ser. No. 08/209,741. See also EP 0 546 073 B1, WO 92/03918, WO 92/22645, WO 92/22647, WO 92/22670, WO 93/12227, WO 94/00569, WO 94/25585, WO 96/14436, WO 97/13852, and WO 98/24884 and U.S. Pat. No. 5,981,175. See further Taylor et al. (1992), Chen et al. (1993), Tuaillon et al. (1993), Choi et al. (1993), Lonberg et al. (1994), Taylor et al. (1994), and Tuaillon et al. (1995), Fishwild et al. (1996).

[0114] Kirin has also demonstrated the generation of human antibodies from mice in which, through microcell fusion, large pieces of chromosomes, or entire chromosomes, have been introduced. See European Patent Application Nos. 773 288 and 843 961. Xenerex Biosciences is developing a technology for the potential generation of human antibodies. In this technology, SCID mice are reconstituted with human lymphatic cells, e.g., B and/or T cells. Mice are then immunized with an antigen and can generate an immune response against the antigen. See U.S. Pat. Nos. 5,476,996; 5,698,767; and 5,958,765.

[0115] Human anti-mouse antibody (HAMA) responses have led the industry to prepare chimeric or otherwise humanized antibodies. It is however expected that certain human anti-chimeric antibody (HACA) responses will be observed, particularly in chronic or multi-dose utilizations of the antibody. Thus, it would be desirable to provide antibody constructs comprising a human binding domain against MUC17 and a human binding domain against CD3E in order to vitiate concerns and/or effects of HAMA or HACA response.

[0116] The terms “(specifically) binds to”, (specifically) recognizes”, “is (specifically) directed to”, and “(specifically) reacts with” mean in accordance with this invention that a binding domain interacts or specifically interacts with a given epitope or a given target side on the target molecules (antigens), here: MUC17 and CD3ε, respectively.

[0117] The term “epitope” refers to a side on an antigen to which a binding domain, such as an antibody or immunoglobulin, or a derivative, fragment or variant of an antibody or an immunoglobulin, specifically binds. An “epitope” is antigenic and thus the term epitope is sometimes also referred to herein as “antigenic structure” or “antigenic determinant”. Thus, the binding domain is an “antigen interaction side”. Said binding/interaction is also understood to define a “specific recognition”.

[0118] “Epitopes” can be formed both by contiguous amino acids or non-contiguous amino acids juxtaposed by tertiary folding of a protein. A “linear epitope” is an epitope where an amino acid primary sequence comprises the recognized epitope. A linear epitope typically includes at least 3 or at least 4, and more usually, at least 5 or at least 6 or at least 7, for example, about 8 to about 10 amino acids in a unique sequence.

[0119] A “conformational epitope”, in contrast to a linear epitope, is an epitope wherein the primary sequence of the amino acids comprising the epitope is not the sole defining component of the epitope recognized (e.g., an epitope wherein the primary sequence of amino acids is not necessarily recognized by the binding domain). Typically, a conformational epitope comprises an increased number of amino acids relative to a linear epitope. With regard to recognition of conformational epitopes, the binding domain recognizes a three-dimensional structure of the antigen, preferably a peptide or protein or fragment thereof (in the context of the present invention, the antigenic structure for one of the binding domains is comprised within the target cell surface antigen protein). For example, when a protein molecule folds to form a three-dimensional structure, certain amino acids and/or the polypeptide backbone forming the conformational epitope become juxtaposed enabling the antibody to recognize the epitope. Methods of determining the conformation of epitopes include, but are not limited to, x-ray crystallography, two-dimensional nuclear magnetic resonance (2D-NMR) spectroscopy and site-directed spin labelling and electron paramagnetic resonance (EPR) spectroscopy.

[0120] A method for epitope mapping is described in the following: When a region (a contiguous amino acid stretch) in the human MUC17 protein is exchanged or replaced with its corresponding region of a non-human and non-primate MUC17 (e.g., mouse MUC17, but others like chicken, rat, hamster, rabbit etc. may also be conceivable), a decrease in the binding of the binding domain is expected to occur, unless the binding domain is cross-reactive for the non-human, non-primate MUC17 used. Said decrease is preferably at least 10%, 20%, 30%, 40%, or 50%; more preferably at least 60%, 70%, or 80%, and most preferably 90%, 95% or even 100% in comparison to the binding to the respective region in the human MUC17 protein, whereby binding to the respective region in the human MUC17 protein is set to be 100%. It is envisaged that the aforementioned human MUC17/non-human MUC17 chimeras are expressed in CHO cells. It is also envisaged that the human MUC17/non-human MUC17 chimeras are fused with a transmembrane domain and/or cytoplasmic domain of a different membrane-bound protein such as EpCAM.

[0121] In an alternative or additional method for epitope mapping, several truncated versions of the human MUC17 extracellular domain can be generated in order to determine a specific region that is recognized by a binding domain. In these truncated versions, the different extracellular MUC17 domains/sub-domains or regions are stepwise deleted, starting from the N-terminus. It is envisaged that the truncated MUC17 versions may be expressed in CHO cells. It is also envisaged that the truncated MUC17 versions may be fused with a transmembrane domain and/or cytoplasmic domain of a different membrane-bound protein such as EpCAM. It is also envisaged that the truncated MUC17 versions may encompass a signal peptide domain at their N-terminus, for example a signal peptide derived from mouse IgG heavy chain signal peptide. It is furthermore envisaged that the truncated MUC17 versions may encompass a v5 domain at their N-terminus (following the signal peptide) which allows verifying their correct expression on the cell surface. A decrease or a loss of binding is expected to occur with those truncated MUC17 versions which do not encompass any more the MUC17 region that is recognized by the binding domain. The decrease of binding is preferably at least 10%, 20%, 30%, 40%, 50%; more preferably at least 60%, 70%, 80%, and most preferably 90%, 95% or even 100%, whereby binding to the entire human MUC17 protein (or its extracellular region or domain) is set to be 100.

[0122] A further method to determine the contribution of a specific residue of MUC17 to the recognition by an antibody construct or binding domain is alanine scanning (see e.g. Morrison K L & Weiss G A. Cur Opin Chem Biol. 2001 June; 5(3):302-7), where each residue to be analyzed is replaced by alanine, e.g. via site-directed mutagenesis. Alanine is used because of its non-bulky, chemically inert, methyl functional group that nevertheless mimics the secondary structure references that many of the other amino acids possess. Sometimes bulky amino acids such as valine or leucine can be used in cases where conservation of the size of mutated residues is desired. Alanine scanning is a mature technology which has been used for a long period of time.

[0123] The interaction between the binding domain and the epitope or the region comprising the epitope implies that a binding domain exhibits appreciable affinity for the epitope/the region comprising the epitope on a particular protein or antigen (here: MUC17 and CD3, respectively) and, generally, does not exhibit significant reactivity with proteins or antigens other than the MUC17 or CD3. “Appreciable affinity” includes binding with an affinity of about 10⁻⁶ M (K_{D}) or stronger. Preferably, binding is considered specific when the binding affinity is about 10⁻¹² to 10⁻⁸ M, 10⁻¹² to 10⁻⁹ M, 10⁻¹² to 10⁻¹⁰ M, 10⁻¹¹ to 10⁻⁸ M, preferably of about 10⁻¹¹ to 10⁻⁹ M. Whether a binding domain specifically reacts with or binds to a target can be tested readily by, inter alia, comparing the reaction of said binding domain with a target protein or antigen with the reaction of said binding domain with proteins or antigens other than the MUC17 or CD3. Preferably, a binding domain of the invention does not essentially or substantially bind to proteins or antigens other than MUC17 or CD3 (i.e., the first binding domain is not capable of binding to proteins other than MUC17 and the second binding domain is not capable of binding to proteins other than CD3). It is an envisaged characteristic of the antibody constructs according to the present invention to have superior affinity characteristics in comparison to other HLE formats. Such a superior affinity, in consequence, suggests a prolonged half-life in vivo. The longer half-life of the antibody constructs according to the present invention may reduce the duration and frequency of administration which typically contributes to improved patient compliance. This is of particular importance as the antibody constructs of the present invention are particularly beneficial for highly weakened or even multimorbid cancer patients.

[0124] The term “does not essentially/substantially bind” or “is not capable of binding” means that a binding domain of the present invention does not bind a protein or antigen other than the MUC17 or CD3, i.e., does not show reactivity of more than 30%, preferably not more than 20%, more preferably not more than 10%, particularly preferably not more than 9%, 8%, 7%, 6% or 5% with proteins or antigens other than MUC17 or CD3, whereby binding to the MUC17 or CD3, respectively, is set to be 100%.

[0125] Specific binding is believed to be effected by specific motifs in the amino acid sequence of the binding domain and the antigen. Thus, binding is achieved as a result of their primary, secondary and/or tertiary structure as well as the result of secondary modifications of said structures. The specific interaction of the antigen-interaction-side with its specific antigen may result in a simple binding of said side to the antigen. Moreover, the specific interaction of the antigen-interaction-side with its specific antigen may alternatively or additionally result in the initiation of a signal, e.g. due to the induction of a change of the conformation of the antigen, an oligomerization of the antigen, etc.

[0126] The term “variable” refers to the portions of the antibody or immunoglobulin domains that exhibit variability in their sequence and that are involved in determining the specificity and binding affinity of a particular antibody (i.e., the “variable domain(s)”). The pairing of a variable heavy chain (VH) and a variable light chain (VL) together forms a single antigen-binding site.

[0127] Variability is not evenly distributed throughout the variable domains of antibodies; it is concentrated in sub-domains of each of the heavy and light chain variable regions. These sub-domains are called “hypervariable regions” or “complementarity determining regions” (CDRs). The more conserved (i.e., non-hypervariable) portions of the variable domains are called the “framework” regions (FRM or FR) and provide a scaffold for the six CDRs in three dimensional space to form an antigen-binding surface. The variable domains of naturally occurring heavy and light chains each comprise four FRM regions (FR1, FR2, FR3, and FR4), largely adopting a β-sheet configuration, connected by three hypervariable regions, which form loops connecting, and in some cases forming part of, the β-sheet structure. The hypervariable regions in each chain are held together in close proximity by the FRM and, with the hypervariable regions from the other chain, contribute to the formation of the antigen-binding side (see Kabat et al., loc. cit.).

[0128] The terms “CDR”, and its plural “CDRs”, refer to the complementarity determining region of which three make up the binding character of a light chain variable region (CDR-L1, CDR-L2 and CDR-L3) and three make up the binding character of a heavy chain variable region (CDR-H1, CDR-H2 and CDR-H3). CDRs contain most of the residues responsible for specific interactions of the antibody with the antigen and hence contribute to the functional activity of an antibody molecule: they are the main determinants of antigen specificity.

[0129] The exact definitional CDR boundaries and lengths are subject to different classification and numbering systems. CDRs may therefore be referred to by Kabat, Chothia, contact or any other boundary definitions, including the numbering system described herein. Despite differing boundaries, each of these systems has some degree of overlap in what constitutes the so called “hypervariable regions” within the variable sequences. CDR definitions according to these systems may therefore differ in length and boundary areas with respect to the adjacent framework region. See for example Kabat (an approach based on cross-species sequence variability), Chothia (an approach based on crystallographic studies of antigen-antibody complexes), and/or MacCallum (Kabat et al., loc. cit.; Chothia et al., J. MoI. Biol, 1987, 196: 901-917; and MacCallum et al., J. MoI. Biol, 1996, 262: 732). Still another standard for characterizing the antigen binding side is the AbM definition used by Oxford Molecular's AbM antibody modeling software. See, e.g., Protein Sequence and Structure Analysis of Antibody Variable Domains. In: Antibody Engineering Lab Manual (Ed.: Duebel, S. and Kontermann, R., Springer-Verlag, Heidelberg). To the extent that two residue identification techniques define regions of overlapping, but not identical regions, they can be combined to define a hybrid CDR. However, the numbering in accordance with the so-called Kabat system is preferred.

[0130] Typically, CDRs form a loop structure that can be classified as a canonical structure. The term “canonical structure” refers to the main chain conformation that is adopted by the antigen binding (CDR) loops. From comparative structural studies, it has been found that five of the six antigen binding loops have only a limited repertoire of available conformations. Each canonical structure can be characterized by the torsion angles of the polypeptide backbone. Correspondent loops between antibodies may, therefore, have very similar three dimensional structures, despite high amino acid sequence variability in most parts of the loops (Chothia and Lesk, J. MoI. Biol., 1987, 196: 901; Chothia et al., Nature, 1989, 342: 877; Martin and Thornton, J. Mol. Biol, 1996, 263: 800). Furthermore, there is a relationship between the adopted loop structure and the amino acid sequences surrounding it. The conformation of a particular canonical class is determined by the length of the loop and the amino acid residues residing at key positions within the loop, as well as within the conserved framework (i.e., outside of the loop). Assignment to a particular canonical class can therefore be made based on the presence of these key amino acid residues.

[0131] The term “canonical structure” may also include considerations as to the linear sequence of the antibody, for example, as catalogued by Kabat (Kabat et al., loc. cit.). The Kabat numbering scheme (system) is a widely adopted standard for numbering the amino acid residues of an antibody variable domain in a consistent manner and is the preferred scheme applied in the present invention as also mentioned elsewhere herein. Additional structural considerations can also be used to determine the canonical structure of an antibody. For example, those differences not fully reflected by Kabat numbering can be described by the numbering system of Chothia et al. and/or revealed by other techniques, for example, crystallography and two- or three-dimensional computational modeling. Accordingly, a given antibody sequence may be placed into a canonical class which allows for, among other things, identifying appropriate chassis sequences (e.g., based on a desire to include a variety of canonical structures in a library). Kabat numbering of antibody amino acid sequences and structural considerations as described by Chothia et al., loc. cit. and their implications for construing canonical aspects of antibody structure, are described in the literature. The subunit structures and three-dimensional configurations of different classes of immunoglobulins are well known in the art. For a review of the antibody structure, see Antibodies: A Laboratory Manual, Cold Spring Harbor Laboratory, eds. Harlow et al., 1988.

[0132] The CDR3 of the light chain and, particularly, the CDR3 of the heavy chain may constitute the most important determinants in antigen binding within the light and heavy chain variable regions. In some antibody constructs, the heavy chain CDR3 appears to constitute the major area of contact between the antigen and the antibody. In vitro selection schemes in which CDR3 alone is varied can be used to vary the binding properties of an antibody or determine which residues contribute to the binding of an antigen. Hence, CDR3 is typically the greatest source of molecular diversity within the antibody-binding side. H3, for example, can be as short as two amino acid residues or greater than 26 amino acids.

[0133] In a classical full-length antibody or immunoglobulin, each light (L) chain is linked to a heavy (H) chain by one covalent disulfide bond, while the two H chains are linked to each other by one or more disulfide bonds depending on the H chain isotype. The CH domain most proximal to VH is usually designated as CH1. The constant (“C”) domains are not directly involved in antigen binding, but exhibit various effector functions, such as antibody-dependent, cell-mediated cytotoxicity and complement activation. The Fc region of an antibody is comprised within the heavy chain constant domains and is for example able to interact with cell surface located Fc receptors.

[0134] The sequence of antibody genes after assembly and somatic mutation is highly varied, and these varied genes are estimated to encode 10¹⁰ different antibody molecules (Immunoglobulin Genes, 2^{nd} ed., eds. Jonio et al., Academic Press, San Diego, Calif., 1995). Accordingly, the immune system provides a repertoire of immunoglobulins. The term “repertoire” refers to at least one nucleotide sequence derived wholly or partially from at least one sequence encoding at least one immunoglobulin. The sequence(s) may be generated by rearrangement in vivo of the V, D, and J segments of heavy chains, and the V and J segments of light chains. Alternatively, the sequence(s) can be generated from a cell in response to which rearrangement occurs, e.g., in vitro stimulation. Alternatively, part or all of the sequence(s) may be obtained by DNA splicing, nucleotide synthesis, mutagenesis, and other methods, see, e.g., U.S. Pat. No. 5,565,332. A repertoire may include only one sequence or may include a plurality of sequences, including ones in a genetically diverse collection.

[0135] The term “Fc portion” or “Fc monomer” means in connection with this invention a polypeptide comprising at least one domain having the function of a CH2 domain and at least one domain having the function of a CH3 domain of an immunoglobulin molecule. As apparent from the term “Fc monomer”, the polypeptide comprising those CH domains is a “polypeptide monomer”. An Fc monomer can be a polypeptide comprising at least a fragment of the constant region of an immunoglobulin excluding the first constant region immunoglobulin domain of the heavy chain (CH1), but maintaining at least a functional part of one CH2 domain and a functional part of one CH3 domain, wherein the CH2 domain is amino terminal to the CH3 domain. In a preferred aspect of this definition, an Fc monomer can be a polypeptide constant region comprising a portion of the Ig-Fc hinge region, a CH2 region and a CH3 region, wherein the hinge region is amino terminal to the CH2 domain. It is envisaged that the hinge region of the present invention promotes dimerization. Such Fc polypeptide molecules can be obtained by papain digestion of an immunoglobulin region (of course resulting in a dimer of two Fc polypeptide), for example and not limitation. In another aspect of this definition, an Fc monomer can be a polypeptide region comprising a portion of a CH2 region and a CH3 region. Such Fc polypeptide molecules can be obtained by pepsin digestion of an immunoglobulin molecule, for example and not limitation. In one embodiment, the polypeptide sequence of an Fc monomer is substantially similar to an Fc polypeptide sequence of: an IgG₁ Fc region, an IgG₂ Fc region, an IgG₃ Fc region, an IgG₄ Fc region, an IgM Fc region, an IgA Fc region, an IgD Fc region and an IgE Fc region. (See, e.g., Padlan, Molecular Immunology, 31(3), 169-217 (1993)). Because there is some variation between immunoglobulins, and solely for clarity, Fc monomer refers to the last two heavy chain constant region immunoglobulin domains of IgA, IgD, and IgG, and the last three heavy chain constant region immunoglobulin domains of IgE and IgM. As mentioned, the Fc monomer can also include the flexible hinge N-terminal to these domains. For IgA and IgM, the Fc monomer may include the J chain. For IgG, the Fc portion comprises immunoglobulin domains CH2 and CH3 and the hinge between the first two domains and CH2. Although the boundaries of the Fc portion may vary an example for a human IgG heavy chain Fc portion comprising a functional hinge, CH2 and CH3 domain can be defined e.g. to comprise residues D231 (of the hinge domain—corresponding to D234 in Table 1 below) to P476, respectively L476 (for IgG₄) of the carboxyl-terminus of the CH3 domain, wherein the numbering is according to Kabat. The two Fc portion or Fc monomer, which are fused to each other via a peptide linker define the third domain of the antibody construct of the invention, which may also be defined as scFc domain

[0136] In one embodiment of the invention it is envisaged that a scFc domain as disclosed herein, respectively the Fc monomers fused to each other are comprised only in the third domain of the antibody construct.

[0137] In line with the present invention an IgG hinge region can be identified by analogy using the Kabat numbering as set forth in Table 1. In line with the above, it is envisaged that for a hinge domain/region of the present invention the minimal requirement comprises the amino acid residues corresponding to the IgG1 sequence stretch of D231 D234 to P243 according to the Kabat numbering. It is likewise envisaged that a hinge domain/region of the present invention comprises or consists of the IgG1 hinge sequence DKTHTCPPCP (SEQ ID NO: 477) (corresponding to the stretch D234 to P243 as shown in Table 1 below—variations of said sequence are also envisaged provided that the hinge region still promotes dimerization). In a preferred embodiment of the invention the glycosylation site at Kabat position 314 of the CH2 domains in the third domain of the antibody construct is removed by a N314X substitution, wherein X is any amino acid excluding Q. Said substitution is preferably a N314G substitution. In a more preferred embodiment, said CH2 domain additionally comprises the following substitutions (position according to Kabat) V321C and R309C (these substitutions introduce the intra domain cysteine disulfide bridge at Kabat positions 309 and 321).

[0138] It is also envisaged that the third domain of the antibody construct of the invention comprises or consists in an amino to carboxyl order: DKTHTCPPCP (SEQ ID NO: 477) (i.e. hinge) —CH2-CH3-linker-DKTHTCPPCP (SEQ ID NO: 477) (i.e. hinge) —CH2-CH3. The peptide linker of the aforementioned antibody construct is in a preferred embodiment characterized by the amino acid sequence Gly-Gly-Gly-Gly-Ser, i.e. Gly4Ser (SEQ ID NO: 1), or polymers thereof, i.e. (Gly4Ser)x, where x is an integer of 5 or greater (e.g. 5, 6, 7, 8 etc. or greater), 6 being preferred ((Gly4Ser)6). Said construct may further comprise the aforementioned substitutions: N314X, preferably N314G, and/or the further substitutions V321C and R309C. In a preferred embodiment of the antibody constructs of the invention as defined herein before, it is envisaged that the second domain binds to an extracellular epitope of the human and/or the Macaca CD3c chain.

TABLE 1
Kabat numbering of the amino acid residues of the hinge region

| IMGT numbering | IgG₁ amino acid | Kabat |
|---|---|---|
| for the hinge | translation | numbering |
| 1 | (E) | 226 |
| 2 | P | 227 |
| 3 | K | 228 |
| 4 | S | 232 |
| 5 | C | 233 |
| 6 | D | 234 |
| 7 | K | 235 |
| 8 | T | 236 |
| 9 | H | 237 |
| 10 | T | 238 |
| 11 | C | 239 |
| 12 | P | 240 |
| 13 | P | 241 |
| 14 | C | 242 |
| 15 | P | 243 |

[0139] In further embodiments of the present invention, the hinge domain/region comprises or consists of the IgG2 subtype hinge sequence ERKCCVECPPCP (SEQ ID NO: 478), the IgG3 subtype hinge sequence ELKTPLDTTHTCPRCP (SEQ ID NO: 479) or ELKTPLGDTTHTCPRCP (SEQ ID NO: 486), and/or the IgG4 subtype hinge sequence ESKYGPPCPSCP (SEQ ID NO: 480). The IgG1 subtype hinge sequence may be the following one EPKSCDKTHTCPPCP (as shown in Table 1 and SEQ ID NO: 487). These core hinge regions are thus also envisaged in the context of the present invention.

[0140] The location and sequence of the IgG CH2 and IgG CD3 domain can be identified by analogy using the Kabat numbering as set forth in Table 2:

TABLE 2
Kabat numbering of the amino acid residues
of the IgG CH2 and CH3 region

| IgG | CH2 aa | CH2 Kabat | CH3 aa | CH3 Kabat |
|---|---|---|---|---|
| subtype | translation | numbering | translation | numbering |
| IgG₁ | APE . . . KAK | 244 . . . 360 | GQP . . . PGK | 361 . . . 478 |
| IgG₂ | APP . . . KTK | 244 . . . 360 | GQP . . . PGK | 361 . . . 478 |
| IgG₃ | APE . . . KTK | 244 . . . 360 | GQP . . . PGK | 361 . . . 478 |
| IgG₄ | APE . . . KAK | 244 . . . 360 | GQP . . . LGK | 361 . . . 478 |

[0141] In one embodiment of the invention the emphasized bold amino acid residues in the CH3 domain of the first or both Fc monomers are deleted.

[0142] The peptide linker, by whom the polypeptide monomers (“Fc portion” or “Fc monomer”) of the third domain are fused to each other, preferably comprises at least 25 amino acid residues (25, 26, 27, 28, 29, 30 etc.). More preferably, this peptide linker comprises at least 30 amino acid residues (30, 31, 32, 33, 34, 35 etc.). It is also preferred that the linker comprises up to 40 amino acid residues, more preferably up to 35 amino acid residues, most preferably exactly 30 amino acid residues. A preferred embodiment of such peptide linker is characterized by the amino acid sequence Gly-Gly-Gly-Gly-Ser, i.e. Gly₄Ser (SEQ ID NO: 1), or polymers thereof, i.e. (Gly₄Ser)x, where x is an integer of 5 or greater (e.g. 6, 7 or 8). Preferably the integer is 6 or 7, more preferably the integer is 6.

[0143] In the event that a linker is used to fuse the first domain to the second domain, or the first or second domain to the third domain, this linker is preferably of a length and sequence sufficient to ensure that each of the first and second domains can, independently from one another, retain their differential binding specificities. For peptide linkers which connect the at least two binding domains (or two variable domains) in the antibody construct of the invention, those peptide linkers are preferred which comprise only a few number of amino acid residues, e.g. 12 amino acid residues or less. Thus, peptide linkers of 12, 11, 10, 9, 8, 7, 6 or 5 amino acid residues are preferred. An envisaged peptide linker with less than 5 amino acids comprises 4, 3, 2 or one amino acid(s), wherein Gly-rich linkers are preferred. A preferred embodiment of the peptide linker for a fusion the first and the second domain is depicted in SEQ ID NO:1. A preferred linker embodiment of the peptide linker for fusing the second and the third domain is a (Gly)₄-linker, also called G₄-linker.

[0144] A particularly preferred “single” amino acid in the context of one of the above described “peptide linker” is Gly. Accordingly, said peptide linker may consist of the single amino acid Gly. In a preferred embodiment of the invention a peptide linker is characterized by the amino acid sequence Gly-Gly-Gly-Gly-Ser, i.e. Gly₄Ser (SEQ ID NO: 1), or polymers thereof, i.e. (Gly₄Ser)x, where x is an integer of 1 or greater (e.g. 2 or 3). Preferred linkers are depicted in SEQ ID NOs: 1 to 12. The characteristics of said peptide linker, which comprise the absence of the promotion of secondary structures, are known in the art and are described e.g. in Dall'Acqua et al. (Biochem. (1998) 37, 9266-9273), Cheadle et al. (Mol Immunol (1992) 29, 21-30) and Raag and Whitlow (FASEB (1995) 9(1), 73-80). Peptide linkers which furthermore do not promote any secondary structures are preferred. The linkage of said domains to each other can be provided, e.g., by genetic engineering, as described in the examples. Methods for preparing fused and operatively linked bispecific single chain constructs and expressing them in mammalian cells or bacteria are well-known in the art (e.g. WO 99/54440 or Sambrook et al., Molecular Cloning: A Laboratory Manual, Cold Spring Harbor Laboratory Press, Cold Spring Harbor, N.Y., 2001).

[0145] In a preferred embodiment of the antibody construct or the present invention the first and second domain form an antibody construct in a format selected from the group consisting of (scFv)₂, scFv-single domain mAb, diabody and oligomers of any of these formats.

[0146] According to a particularly preferred embodiment, and as documented in the appended examples, the first and the second domain of the antibody construct of the invention is a “bispecific single chain antibody construct”, more preferably a bispecific “single chain Fv” (scFv). Although the two domains of the Fv fragment, VL and VH, are coded for by separate genes, they can be joined, using recombinant methods, by a synthetic linker—as described hereinbefore—that enables them to be made as a single protein chain in which the VL and VH regions pair to form a monovalent molecule; see e.g., Huston et al. (1988) Proc. Natl. Acad. Sci USA 85:5879-5883). These antibody fragments are obtained using conventional techniques known to those with skill in the art, and the fragments are evaluated for function in the same manner as are whole or full-length antibodies. A single-chain variable fragment (scFv) is hence a fusion protein of the variable region of the heavy chain (VH) and of the light chain (VL) of immunoglobulins, usually connected with a short linker peptide of about ten to about 25 amino acids, preferably about 15 to 20 amino acids. The linker is usually rich in glycine for flexibility, as well as serine or threonine for solubility, and can either connect the N-terminus of the VH with the C-terminus of the VL, or vice versa. This protein retains the specificity of the original immunoglobulin, despite removal of the constant regions and introduction of the linker.

[0147] Bispecific single chain antibody constructs are known in the art and are described in WO 99/54440, Mack, J. Immunol. (1997), 158, 3965-3970, Mack, PNAS, (1995), 92, 7021-7025, Kufer, Cancer Immunol. Immunother., (1997), 45, 193-197, Löffler, Blood, (2000), 95, 6, 2098-2103, Briihl, Immunol., (2001), 166, 2420-2426, Kipriyanov, J. Mol. Biol., (1999), 293, 41-56. Techniques described for the production of single chain antibodies (see, inter alia, U.S. Pat. No. 4,946,778, Kontermann and Dübel (2010), loc. cit. and Little (2009), loc. cit.) can be adapted to produce single chain antibody constructs specifically recognizing (an) elected target(s).

[0148] Bivalent (also called divalent) or bispecific single-chain variable fragments (bi-scFvs or di-scFvs having the format (scFv)₂ can be engineered by linking two scFv molecules (e.g. with linkers as described hereinbefore). If these two scFv molecules have the same binding specificity, the resulting (scFv)₂ molecule will preferably be called bivalent (i.e. it has two valences for the same target epitope). If the two scFv molecules have different binding specificities, the resulting (scFv)₂ molecule will preferably be called bispecific. The linking can be done by producing a single peptide chain with two VH regions and two VL regions, yielding tandem scFvs (see e.g. Kufer P. et al., (2004) Trends in Biotechnology 22(5):238-244). Another possibility is the creation of scFv molecules with linker peptides that are too short for the two variable regions to fold together (e.g. about five amino acids), forcing the scFvs to dimerize. This type is known as diabodies (see e.g. Hollinger, Philipp et al., (July 1993) Proceedings of the National Academy of Sciences of the United States of America 90 (14): 6444-8).

[0149] In line with this invention either the first, the second or the first and the second domain may comprise a single domain antibody, respectively the variable domain or at least the CDRs of a single domain antibody. Single domain antibodies comprise merely one (monomeric) antibody variable domain which is able to bind selectively to a specific antigen, independently of other V regions or domains. The first single domain antibodies were engineered from heavy chain antibodies found in camelids, and these are called V_{H}H fragments. Cartilaginous fishes also have heavy chain antibodies (IgNAR) from which single domain antibodies called V_{NAR} fragments can be obtained. An alternative approach is to split the dimeric variable domains from common immunoglobulins e.g. from humans or rodents into monomers, hence obtaining VH or VL as a single domain Ab. Although most research into single domain antibodies is currently based on heavy chain variable domains, nanobodies derived from light chains have also been shown to bind specifically to target epitopes. Examples of single domain antibodies are called sdAb, nanobodies or single variable domain antibodies.

[0150] A (single domain mAb)₂ is hence a monoclonal antibody construct composed of (at least) two single domain monoclonal antibodies, which are individually selected from the group comprising V_{H}, V_{L}, V_{H}H and V_{NAR}. The linker is preferably in the form of a peptide linker. Similarly, an “scFv-single domain mAb” is a monoclonal antibody construct composed of at least one single domain antibody as described above and one scFv molecule as described above. Again, the linker is preferably in the form of a peptide linker.

[0151] Whether or not an antibody construct competes for binding with another given antibody construct can be measured in a competition assay such as a competitive ELISA or a cell-based competition assay. Avidin-coupled microparticles (beads) can also be used similar to an avidin-coated ELISA plate, when reacted with a biotinylated protein, each of these beads can be used as a substrate on which an assay can be performed. Antigen is coated onto a bead and then precoated with the first antibody. The second antibody is added and any additional binding is determined. Possible means for the read-out includes flow cytometry.

[0152] T cells or T lymphocytes are a type of lymphocyte (itself a type of white blood cell) that play a central role in cell-mediated immunity. There are several subsets of T cells, each with a distinct function. T cells can be distinguished from other lymphocytes, such as B cells and NK cells, by the presence of a T cell receptor (TCR) on the cell surface. The TCR is responsible for recognizing antigens bound to major histocompatibility complex (MHC) molecules and is composed of two different protein chains. In 95% of the T cells, the TCR consists of an alpha (α) and beta (β) chain. When the TCR engages with antigenic peptide and MHC (peptide/MHC complex), the T lymphocyte is activated through a series of biochemical events mediated by associated enzymes, co-receptors, specialized adaptor molecules, and activated or released transcription factors.

[0153] The CD3 receptor complex is a protein complex and is composed of four chains. In mammals, the complex contains a CD3γ (gamma) chain, a CD3δ (delta) chain, and two CD3c (epsilon) chains. These chains associate with the T cell receptor (TCR) and the so-called (zeta) chain to form the T cell receptor CD3 complex and to generate an activation signal in T lymphocytes. The CD3γ (gamma), CD3δ (delta), and CD3ε (epsilon) chains are highly related cell-surface proteins of the immunoglobulin superfamily containing a single extracellular immunoglobulin domain. The intracellular tails of the CD3 molecules contain a single conserved motif known as an immunoreceptor tyrosine-based activation motif or ITAM for short, which is essential for the signaling capacity of the TCR. The CD3 epsilon molecule is a polypeptide which in humans is encoded by the CD3E gene which resides on chromosome 11. The most preferred epitope of CD3 epsilon is comprised within amino acid residues 1-27 of the human CD3 epsilon extracellular domain. It is envisaged that antibody constructs according to the present invention typically and advantageously show less unspecific T cell activation, which is not desired in specific immunotherapy. This translates to a reduced risk of side effects.

[0154] The redirected lysis of target cells via the recruitment of T cells by a multispecific, at least bispecific, antibody construct involves cytolytic synapse formation and delivery of perforin and granzymes. The engaged T cells are capable of serial target cell lysis, and are not affected by immune escape mechanisms interfering with peptide antigen processing and presentation, or clonal T cell differentiation; see, for example, WO 2007/042261.

[0155] Cytotoxicity mediated by antibody constructs of the invention can be measured in various ways. Effector cells can be e.g. stimulated enriched (human) CD8 positive T cells or unstimulated (human) peripheral blood mononuclear cells (PBMC). If the target cells are of macaque origin or express or are transfected with macaque MUC17 which is bound by the first domain, the effector cells should also be of macaque origin such as a macaque T cell line, e.g. 4119LnPx. The target cells should express (at least the extracellular domain of) MUC17, e.g. human or macaque MUC17. Target cells can be a cell line (such as CHO) which is stably or transiently transfected with MUC17, e.g. human or macaque MUC17. Usually EC₅₀ values are expected to be lower with target cell lines expressing higher levels of MUC17 on the cell surface. The effector to target cell (E:T) ratio is usually about 10:1, but can also vary. Cytotoxic activity of MUC17bispecific antibody constructs can be measured in a ⁵¹Cr-release assay (incubation time of about 18 hours) or in a in a FACS-based cytotoxicity assay (incubation time of about 48 hours). Modifications of the assay incubation time (cytotoxic reaction) are also possible. Other methods of measuring cytotoxicity are well-known to the skilled person and comprise MTT or MTS assays, ATP-based assays including bioluminescent assays, the sulforhodamine B (SRB) assay, WST assay, clonogenic assay and the ECIS technology.

[0156] The cytotoxic activity mediated by MUC17×CD3 bispecific antibody constructs of the present invention is preferably measured in a cell-based cytotoxicity assay. It may also be measured in a ⁵¹Cr-release assay. It is represented by the EC₅₀ value, which corresponds to the half maximal effective concentration (concentration of the antibody construct which induces a cytotoxic response halfway between the baseline and maximum). Preferably, the EC₅₀ value of the MUC17×CD3 bispecific antibody constructs is ≤5000 pM or ≤4000 pM, more preferably ≤3000 pM or ≤2000 pM, even more preferably ≤1000 pM or ≤500 pM, even more preferably ≤400 pM or ≤300 pM, even more preferably ≤200 pM, even more preferably ≤100 pM, even more preferably ≤50 pM, even more preferably ≤20 pM or ≤10 pM, and most preferably ≤5 pM.

[0157] The above given EC₅₀ values can be measured in different assays. The skilled person is aware that an EC₅₀ value can be expected to be lower when stimulated/enriched CD8⁺ T cells are used as effector cells, compared with unstimulated PBMC. It can furthermore be expected that the EC₅₀ values are lower when the target cells express a high number of MUC17 compared with a low target expression rat. For example, when stimulated/enriched human CD8⁺ T cells are used as effector cells (and either MUC17 transfected cells such as CHO cells or MUC17 positive human cell lines are used as target cells), the EC₅₀ value of the MUC17×CD3 bispecific antibody construct is preferably ≤1000 pM, more preferably ≤500 pM, even more preferably ≤250 pM, even more preferably ≤100 pM, even more preferably ≤50 pM, even more preferably ≤10 pM, and most preferably ≤5 pM. When human PBMCs are used as effector cells, the EC₅₀ value of the MUC17×CD3 bispecific antibody construct is preferably ≤5000 pM or ≤4000 pM (in particular when the target cells are MUC17 positive human cell lines), more preferably ≤2000 pM (in particular when the target cells are MUC17 transfected cells such as CHO cells), more preferably ≤1000 pM or ≤500 pM, even more preferably ≤200 pM, even more preferably ≤150 pM, even more preferably ≤100 pM, and most preferably ≤50 pM, or lower. When a macaque T cell line such as LnPx4119 is used as effector cells, and a macaque MUC17 transfected cell line such as CHO cells is used as target cell line, the EC₅₀ value of the MUC17×CD3 bispecific antibody construct is preferably ≤2000 pM or ≤1500 pM, more preferably ≤1000 pM or ≤500 pM, even more preferably ≤300 pM or ≤250 pM, even more preferably ≤100 pM, and most preferably ≤50 pM.

[0158] Preferably, the MUC17×CD3 bispecific antibody constructs of the present invention do not induce/mediate lysis or do not essentially induce/mediate lysis of MUC17 negative cells such as CHO cells. The term “do not induce lysis”, “do not essentially induce lysis”, “do not mediate lysis” or “do not essentially mediate lysis” means that an antibody construct of the present invention does not induce or mediate lysis of more than 30%, preferably not more than 20%, more preferably not more than 10%, particularly preferably not more than 9%, 8%, 7%, 6% or 5% of MUC17 negative cells, whereby lysis of a MUC17 positive human cell line is set to be 100%. This usually applies for concentrations of the antibody construct of up to 500 nM. The skilled person knows how to measure cell lysis without further ado. Moreover, the present specification teaches specific instructions how to measure cell lysis.

[0159] The difference in cytotoxic activity between the monomeric and the dimeric isoform of individual MUC17×CD3 bispecific antibody constructs is referred to as “potency gap”. This potency gap can e.g. be calculated as ratio between EC₅₀ values of the molecule's monomeric and dimeric form. Potency gaps of the MUC17×CD3 bispecific antibody constructs of the present invention are preferably ≤5, more preferably ≤4, even more preferably ≤3, even more preferably ≤2 and most preferably ≤1.

[0160] The first and/or the second (or any further) binding domain(s) of the antibody construct of the invention is/are preferably cross-species specific for members of the mammalian order of primates. Cross-species specific CD3 binding domains are, for example, described in WO 2008/119567. According to one embodiment, the first and/or second binding domain, in addition to binding to human MUC17 and human CD3, respectively, will also bind to MUC17/CD3 of primates including (but not limited to) new world primates (such as Callithrix jacchus, Saguinus Oedipus or Saimiri sciureus), old world primates (such baboons and macaques), gibbons, and non-human homininae.

[0161] In one embodiment of the antibody construct of the invention the first domain binds to human MUC17 and further binds to macaque MUC17, such as MUC17 of Macaca fascicularis, and more preferably, to macaque MUC17 expressed on the surface of cells, e.g. such as CHO or 293 cells. The affinity of the first domain for MUC17, preferably for human MUC17, is preferably ≤100 nM or ≤50 nM, more preferably ≤25 nM or ≤20 nM, more preferably ≤15 nM or ≤10 nM, even more preferably ≤5 nM, even more preferably ≤2.5 nM or ≤2 nM, even more preferably ≤1 nM, even more preferably ≤0.6 nM, even more preferably ≤0.5 nM, and most preferably ≤0.4 nM. The affinity can be measured for example in a BIAcore assay or in a Scatchard assay. Other methods of determining the affinity are also well-known to the skilled person. The affinity of the first domain for macaque MUC17 is preferably ≤15 nM, more preferably ≤10 nM, even more preferably ≤5 nM, even more preferably ≤1 nM, even more preferably ≤0.5 nM, even more preferably ≤0.1 nM, and most preferably ≤0.05 nM or even ≤0.01 nM.

[0162] Preferably the affinity gap of the antibody constructs according to the invention for binding macaque MUC17 versus human MUC17 [ma MUC17: hu MUC17] (as determined e.g. by BiaCore or by Scatchard analysis) is <100, preferably <20, more preferably <15, further preferably <10, even more preferably <8, more preferably <6 and most preferably <2. Preferred ranges for the affinity gap of the antibody constructs according to the invention for binding macaque MUC17 versus human MUC17 are between 0.1 and 20, more preferably between 0.2 and 10, even more preferably between 0.3 and 6, even more preferably between 0.5 and 3 or between 0.5 and 2.5, and most preferably between 0.5 and 2 or between 0.6 and 2.

[0163] The second domain of the antibody construct of the invention binds to human CD3 epsilon and/or to Macaca CD3 epsilon. In a preferred embodiment the second domain further binds to Callithrix jacchus, Saguinus Oedipus or Saimiri sciureus CD3 epsilon. Callithrix jacchus and Saguinus oedipus are both new world primate belonging to the family of Callitrichidae, while Saimiri sciureus is a new world primate belonging to the family of Cebidae.

[0164] It is preferred for the antibody construct of the present invention that the second domain which binds to an extracellular epitope of the human and/or the Macaca CD3 epsilon chain comprises a VL region comprising CDR-L1, CDR-L2 and CDR-L3 selected from:

(a) CDR-L1 as depicted in SEQ ID NO: 27 of WO 2008/119567 (SEQ ID NO: 557 herein), CDR-L2 as depicted in SEQ ID NO: 28 of WO 2008/119567 (SEQ ID NO: 542 herein) and CDR-L3 as depicted in SEQ ID NO: 29 of WO 2008/119567 (SEQ ID NO: 546 herein);
(b) CDR-L1 as depicted in SEQ ID NO: 117 of WO 2008/119567 (SEQ ID NO: 574 herein), CDR-L2 as depicted in SEQ ID NO: 118 of WO 2008/119567 (SEQ ID NO: 572 herein) and CDR-L3 as depicted in SEQ ID NO: 119 of WO 2008/119567 (SEQ ID NO: 546 herein); and
(c) CDR-L1 as depicted in SEQ ID NO: 153 of WO 2008/119567 (SEQ ID NO: 581 herein), CDR-L2 as depicted in SEQ ID NO: 154 of WO 2008/119567 (SEQ ID NO: 542 herein) and CDR-L3 as depicted in SEQ ID NO: 155 of WO 2008/119567 (SEQ ID NO: 582 herein).

[0165] In a furthermore preferred embodiment of the antibody construct of the present invention, the second domain which binds to an extracellular epitope of the human and/or the Macaca CD3 epsilon chain comprises a VH region comprising CDR-H 1, CDR-H2 and CDR-H3 selected from:

(a) CDR-H1 as depicted in SEQ ID NO: 12 of WO 2008/119567 (SEQ ID NO: 553 herein), CDR-H2 as depicted in SEQ ID NO: 13 of WO 2008/119567 (SEQ ID NO: 540 herein) and CDR-H3 as depicted in SEQ ID NO: 14 of WO 2008/119567 (SEQ ID NO: 554 herein);
(b) CDR-H1 as depicted in SEQ ID NO: 30 of WO 2008/119567 (SEQ ID NO: 538 herein), CDR-H2 as depicted in SEQ ID NO: 31 of WO 2008/119567 (SEQ ID NO: 541 herein) and CDR-H3 as depicted in SEQ ID NO: 32 of WO 2008/119567 (SEQ ID NO: 543 herein);
(c) CDR-H1 as depicted in SEQ ID NO: 48 of WO 2008/119567 (SEQ ID NO: 547 herein), CDR-H2 as depicted in SEQ ID NO: 49 of WO 2008/119567 (SEQ ID NO: 539 herein) and CDR-H3 as depicted in SEQ ID NO: 50 of WO 2008/119567 (SEQ ID NO: 558 herein);
(d) CDR-H1 as depicted in SEQ ID NO: 66 of WO 2008/119567 (SEQ ID NO: 561 herein), CDR-H2 as depicted in SEQ ID NO: 67 of WO 2008/119567 (SEQ ID NO: 539 herein) and CDR-H3 as depicted in SEQ ID NO: 68 of WO 2008/119567 (SEQ ID NO: 562 herein);
(e) CDR-H1 as depicted in SEQ ID NO: 84 of WO 2008/119567 (SEQ ID NO: 548 herein), CDR-H2 as depicted in SEQ ID NO: 85 of WO 2008/119567 (SEQ ID NO: 549 herein) and CDR-H3 as depicted in SEQ ID NO: 86 of WO 2008/119567 (SEQ ID NO: 565 herein);
(f) CDR-H1 as depicted in SEQ ID NO: 102 of WO 2008/119567 (SEQ ID NO: 538 herein), CDR-H2 as depicted in SEQ ID NO: 103 of WO 2008/119567 (SEQ ID NO: 540 herein) and CDR-H3 as depicted in SEQ ID NO: 104 of WO 2008/119567 (SEQ ID NO: 568 herein);
(g) CDR-H1 as depicted in SEQ ID NO: 120 of WO 2008/119567 (SEQ ID NO: 573 herein), CDR-H2 as depicted in SEQ ID NO: 121 of WO 2008/119567 (SEQ ID NO: 574 herein) and CDR-H3 as depicted in SEQ ID NO: 122 of WO 2008/119567 (SEQ ID NO: 575 herein);
(h) CDR-H1 as depicted in SEQ ID NO: 138 of WO 2008/119567 (SEQ ID NO: 548 herein), CDR-H2 as depicted in SEQ ID NO: 139 of WO 2008/119567 (SEQ ID NO: 549 herein) and CDR-H3 as depicted in SEQ ID NO: 140 of WO 2008/119567 (SEQ ID NO: 578 herein);
(i) CDR-H1 as depicted in SEQ ID NO: 156 of WO 2008/119567 (SEQ ID NO: 547 herein), CDR-H2 as depicted in SEQ ID NO: 157 of WO 2008/119567 (SEQ ID NO: 539 herein) and CDR-H3 as depicted in SEQ ID NO: 158 of WO 2008/119567 (SEQ ID NO: 583 herein); and
(j) CDR-H1 as depicted in SEQ ID NO: 174 of WO 2008/119567 (SEQ ID NO: 538 herein), CDR-H2 as depicted in SEQ ID NO: 175 of WO 2008/119567 (SEQ ID NO: 541 herein) and CDR-H3 as depicted in SEQ ID NO: 176 of WO 2008/119567 (SEQ ID NO: 543 herein).

[0166] In a preferred embodiment of the antibody construct of the invention the above described three groups of VL CDRs are combined with the above described ten groups of VH CDRs within the second binding domain to form (30) groups, each comprising CDR-L 1-3 and CDR-H 1-3.

[0167] It is preferred for the antibody construct of the present invention that the second domain which binds to CD3 comprises a VL region selected from the group consisting of those depicted in SEQ ID NOs: 17, 21, 35, 39, 53, 57, 71, 75, 89, 93, 107, 111, 125, 129, 143, 147, 161, 165, 179 or 183 of WO 2008/119567 (SEQ ID NOs: 537, 536, 537, 536, 537, 536, 537, 536, 550, 551, 537, 536, 550, 551, 537, 536, 13, 552, 13, or 552 herein) or as depicted in SEQ ID NO: 13 according to the present invention.

[0168] It is also preferred that the second domain which binds to CD3 comprises a VH region selected from the group consisting of those depicted in SEQ ID NO: 15, 19, 33, 37, 51, 55, 69, 73, 87, 91, 105, 109, 123, 127, 141, 145, 159, 163, 177 or 181 of WO 2008/119567 (SEQ ID NOs: 555, 556, 544, 545, 559, 560, 563, 564, 566, 567, 569, 570, 576, 577, 579, 580, 584, 585, 544, or 545 herein) or as depicted in SEQ ID NO: 14.

[0169] More preferably, the antibody construct of the present invention is characterized by a second domain which binds to CD3 comprising a VL region and a VH region selected from the group consisting of:

(a) a VL region as depicted in SEQ ID NO: 17 or 21 of WO 2008/119567 (SEQ ID NOs: 537 and 536 herein) and a VH region as depicted in SEQ ID NO: 15 or 19 of WO 2008/119567 (SEQ ID NOs: 555 and 556 herein);
(b) a VL region as depicted in SEQ ID NO: 35 or 39 of WO 2008/119567 (SEQ ID NOs: 537 and 536 herein) and a VH region as depicted in SEQ ID NO: 33 or 37 of WO 2008/119567 (SEQ ID NOs: 544 and 545 herein);
(c) a VL region as depicted in SEQ ID NO: 53 or 57 of WO 2008/119567 (SEQ ID NOs: 537 and 536 herein) and a VH region as depicted in SEQ ID NO: 51 or 55 of WO 2008/119567 (SEQ ID NOs: 559 and 560 herein);
(d) a VL region as depicted in SEQ ID NO: 71 or 75 of WO 2008/119567 (SEQ ID NOs: 537 and 536 herein) and a VH region as depicted in SEQ ID NO: 69 or 73 of WO 2008/119567 (SEQ ID NOs: 563 and 564 herein);
(e) a VL region as depicted in SEQ ID NO: 89 or 93 of WO 2008/119567 (SEQ ID NOs: 550 and 551 herein) and a VH region as depicted in SEQ ID NO: 87 or 91 of WO 2008/119567 (SEQ ID NOs: 566 and 567 herein);
(f) a VL region as depicted in SEQ ID NO: 107 or 111 of WO 2008/119567 (SEQ ID NOs: 537 and 536 herein) and a VH region as depicted in SEQ ID NO: 105 or 109 of WO 2008/119567 (SEQ ID NOs: 569 and 570 herein);
(g) a VL region as depicted in SEQ ID NO: 125 or 129 of WO 2008/119567 (SEQ ID NOs: 550 and 551 herein) and a VH region as depicted in SEQ ID NO: 123 or 127 of WO 2008/119567 (SEQ ID NOs: 576 and 577 herein);
(h) a VL region as depicted in SEQ ID NO: 143 or 147 of WO 2008/119567 (SEQ ID NOs: 537 and 536 herein) and a VH region as depicted in SEQ ID NO: 141 or 145 of WO 2008/119567 (SEQ ID NOs: 579 and 580 herein);
(i) a VL region as depicted in SEQ ID NO: 161 or 165 of WO 2008/119567 (SEQ ID NOs: 13 and 552 herein) and a VH region as depicted in SEQ ID NO: 159 or 163 of WO 2008/119567 (SEQ ID NOs: 584 and 585 herein); and
(j) a VL region as depicted in SEQ ID NO: 179 or 183 of WO 2008/119567 (SEQ ID NOs: 13 and 552 herein) and a VH region as depicted in SEQ ID NO: 177 or 181 of WO 2008/119567 (SEQ ID NOs: 544 and 545 herein).

[0170] Also preferred in connection with the antibody construct of the present invention is a second domain which binds to CD3 comprising a VL region as depicted in SEQ ID NO: 13 and a VH region as depicted in SEQ ID NO: 14.

[0171] According to a preferred embodiment of the antibody construct of the present invention, the first and/or the second domain have the following format: The pairs of VH regions and VL regions are in the format of a single chain antibody (scFv). The VH and VL regions are arranged in the order VH-VL or VL-VH. It is preferred that the VH-region is positioned N-terminally of a linker sequence, and the VL-region is positioned C-terminally of the linker sequence.

[0172] A preferred embodiment of the above described antibody construct of the present invention is characterized by the second domain which binds to CD3 comprising an amino acid sequence selected from the group consisting of SEQ ID NOs: 23, 25, 41, 43, 59, 61, 77, 79, 95, 97, 113, 115, 131, 133, 149, 151, 167, 169, 185 or 187 of WO 2008/119567 (SEQ ID NOs: 586-605 herein) or as depicted in SEQ ID NO: 15.

[0173] It is also envisaged that the first binding domain of the antibody construct of the invention comprises a VL region comprising CDR-L1, CDR-L2 and CDR-L3, and a VH region comprising CDR-H1, CDR-H2 and CDR-3 selected from the group consisting of:

(a) CDR-L1 as depicted in SEQ ID NO. 36, CDR-L2 as depicted in SEQ ID NO. 37 and CDR-L3 as depicted in SEQ ID NO. 38 and CDR-H1 as depicted in SEQ ID NO. 33, CDR-H2 as depicted in SEQ ID NO. 34 and CDR-H3 as depicted in SEQ ID NO. 35;
(b) CDR-L1 as depicted in SEQ ID NO. 47, CDR-L2 as depicted in SEQ ID NO. 48 and CDR-L3 as depicted in SEQ ID NO. 49 and CDR-H1 as depicted in SEQ ID NO. 44, CDR-H2 as depicted in SEQ ID NO. 45 and CDR-H3 as depicted in SEQ ID NO. 46;
(c) CDR-L1 as depicted in SEQ ID NO. 58, CDR-L2 as depicted in SEQ ID NO. 59 and CDR-L3 as depicted in SEQ ID NO. 60 and CDR-H1 as depicted in SEQ ID NO. 55, CDR-H2 as depicted in SEQ ID NO. 56 and CDR-H3 as depicted in SEQ ID NO. 57;
(d) CDR-L1 as depicted in SEQ ID NO. 69, CDR-L2 as depicted in SEQ ID NO. 70 and CDR-L3 as depicted in SEQ ID NO. 71 and CDR-H1 as depicted in SEQ ID NO. 66, CDR-H2 as depicted in SEQ ID NO. 67 and CDR-H3 as depicted in SEQ ID NO. 68;
(e) CDR-L1 as depicted in SEQ ID NO. 80, CDR-L2 as depicted in SEQ ID NO. 81 and CDR-L3 as depicted in SEQ ID NO. 82 and CDR-H1 as depicted in SEQ ID NO. 77, CDR-H2 as depicted in SEQ ID NO. 78 and CDR-H3 as depicted in SEQ ID NO. 79;
(f) CDR-L1 as depicted in SEQ ID NO. 91, CDR-L2 as depicted in SEQ ID NO. 92 and CDR-L3 as depicted in SEQ ID NO. 93 and CDR-H1 as depicted in SEQ ID NO. 88, CDR-H2 as depicted in SEQ ID NO. 89 and CDR-H3 as depicted in SEQ ID NO. 90;
(g) CDR-L1 as depicted in SEQ ID NO. 102, CDR-L2 as depicted in SEQ ID NO. 103 and CDR-L3 as depicted in SEQ ID NO. 104 and CDR-H1 as depicted in SEQ ID NO. 99, CDR-H2 as depicted in SEQ ID NO. 100 and CDR-H3 as depicted in SEQ ID NO. 101;
(h) CDR-L1 as depicted in SEQ ID NO. 113, CDR-L2 as depicted in SEQ ID NO. 114 and CDR-L3 as depicted in SEQ ID NO. 115 and CDR-H1 as depicted in SEQ ID NO. 110, CDR-H2 as depicted in SEQ ID NO. 111 and CDR-H3 as depicted in SEQ ID NO. 112;
(i) CDR-L1 as depicted in SEQ ID NO. 124, CDR-L2 as depicted in SEQ ID NO. 125 and CDR-L3 as depicted in SEQ ID NO. 126 and CDR-H1 as depicted in SEQ ID NO. 121, CDR-H2 as depicted in SEQ ID NO. 122 and CDR-H3 as depicted in SEQ ID NO. 123;
(j) CDR-L1 as depicted in SEQ ID NO. 135, CDR-L2 as depicted in SEQ ID NO. 136 and CDR-L3 as depicted in SEQ ID NO. 137 and CDR-H1 as depicted in SEQ ID NO. 132, CDR-H2 as depicted in SEQ ID NO. 133 and CDR-H3 as depicted in SEQ ID NO. 134;
(k) CDR-L1 as depicted in SEQ ID NO. 146, CDR-L2 as depicted in SEQ ID NO. 147 and CDR-L3 as depicted in SEQ ID NO. 148 and CDR-H1 as depicted in SEQ ID NO. 143, CDR-H2 as depicted in SEQ ID NO. 144 and CDR-H3 as depicted in SEQ ID NO. 145;
(l) CDR-L1 as depicted in SEQ ID NO. 157, CDR-L2 as depicted in SEQ ID NO. 158 and CDR-L3 as depicted in SEQ ID NO. 159 and CDR-H1 as depicted in SEQ ID NO. 154, CDR-H2 as depicted in SEQ ID NO. 155 and CDR-H3 as depicted in SEQ ID NO. 156;
(m) CDR-L1 as depicted in SEQ ID NO. 168, CDR-L2 as depicted in SEQ ID NO. 169 and CDR-L3 as depicted in SEQ ID NO. 170 and CDR-H1 as depicted in SEQ ID NO. 165, CDR-H2 as depicted in SEQ ID NO. 166 and CDR-H3 as depicted in SEQ ID NO. 167;
(n) CDR-L1 as depicted in SEQ ID NO. 179, CDR-L2 as depicted in SEQ ID NO. 180 and CDR-L3 as depicted in SEQ ID NO. 181 and CDR-H1 as depicted in SEQ ID NO. 176, CDR-H2 as depicted in SEQ ID NO. 177 and CDR-H3 as depicted in SEQ ID NO. 178;
(o) CDR-L1 as depicted in SEQ ID NO. 190, CDR-L2 as depicted in SEQ ID NO. 191 and CDR-L3 as depicted in SEQ ID NO. 192 and CDR-H1 as depicted in SEQ ID NO. 187, CDR-H2 as depicted in SEQ ID NO. 188 and CDR-H3 as depicted in SEQ ID NO. 189;
(p) CDR-L1 as depicted in SEQ ID NO. 201, CDR-L2 as depicted in SEQ ID NO. 202 and CDR-L3 as depicted in SEQ ID NO. 203 and CDR-H1 as depicted in SEQ ID NO. 198, CDR-H2 as depicted in SEQ ID NO. 199 and CDR-H3 as depicted in SEQ ID NO. 200;
(q) CDR-L1 as depicted in SEQ ID NO. 212, CDR-L2 as depicted in SEQ ID NO. 213 and CDR-L3 as depicted in SEQ ID NO. 214 and CDR-H1 as depicted in SEQ ID NO. 209, CDR-H2 as depicted in SEQ ID NO. 210 and CDR-H3 as depicted in SEQ ID NO. 211;
(r) CDR-L1 as depicted in SEQ ID NO. 223, CDR-L2 as depicted in SEQ ID NO. 224 and CDR-L3 as depicted in SEQ ID NO. 225 and CDR-H1 as depicted in SEQ ID NO. 220, CDR-H2 as depicted in SEQ ID NO. 221 and CDR-H3 as depicted in SEQ ID NO. 222;
(s) CDR-L1 as depicted in SEQ ID NO. 234, CDR-L2 as depicted in SEQ ID NO. 235 and CDR-L3 as depicted in SEQ ID NO. 236 and CDR-H1 as depicted in SEQ ID NO. 231, CDR-H2 as depicted in SEQ ID NO. 232 and CDR-H3 as depicted in SEQ ID NO. 233;
(t) CDR-L1 as depicted in SEQ ID NO. 245, CDR-L2 as depicted in SEQ ID NO. 246 and CDR-L3 as depicted in SEQ ID NO. 247 and CDR-H1 as depicted in SEQ ID NO. 242, CDR-H2 as depicted in SEQ ID NO. 243 and CDR-H3 as depicted in SEQ ID NO. 244;
(u) CDR-L1 as depicted in SEQ ID NO. 256, CDR-L2 as depicted in SEQ ID NO. 257 and CDR-L3 as depicted in SEQ ID NO. 258 and CDR-H1 as depicted in SEQ ID NO. 253, CDR-H2 as depicted in SEQ ID NO. 254 and CDR-H3 as depicted in SEQ ID NO. 255;
(v) CDR-L1 as depicted in SEQ ID NO. 267, CDR-L2 as depicted in SEQ ID NO. 268 and CDR-L3 as depicted in SEQ ID NO. 269 and CDR-H1 as depicted in SEQ ID NO. 264, CDR-H2 as depicted in SEQ ID NO. 265 and CDR-H3 as depicted in SEQ ID NO. 266;
(w) CDR-L1 as depicted in SEQ ID NO. 278, CDR-L2 as depicted in SEQ ID NO. 279 and CDR-L3 as depicted in SEQ ID NO. 280 and CDR-H1 as depicted in SEQ ID NO. 275, CDR-H2 as depicted in SEQ ID NO. 276 and CDR-H3 as depicted in SEQ ID NO. 276;
(x) CDR-L1 as depicted in SEQ ID NO. 289, CDR-L2 as depicted in SEQ ID NO. 290 and CDR-L3 as depicted in SEQ ID NO. 291 and CDR-H1 as depicted in SEQ ID NO. 286, CDR-H2 as depicted in SEQ ID NO. 287 and CDR-H3 as depicted in SEQ ID NO. 288;
(y) CDR-L1 as depicted in SEQ ID NO. 300, CDR-L2 as depicted in SEQ ID NO. 301 and CDR-L3 as depicted in SEQ ID NO. 302 and CDR-H1 as depicted in SEQ ID NO. 297, CDR-H2 as depicted in SEQ ID NO. 298 and CDR-H3 as depicted in SEQ ID NO. 299;
(z) CDR-L1 as depicted in SEQ ID NO. 311, CDR-L2 as depicted in SEQ ID NO. 312 and CDR-L3 as depicted in SEQ ID NO. 313 and CDR-H1 as depicted in SEQ ID NO. 308, CDR-H2 as depicted in SEQ ID NO. 309 and CDR-H3 as depicted in SEQ ID NO. 310;
(aa) CDR-L1 as depicted in SEQ ID NO. 322, CDR-L2 as depicted in SEQ ID NO. 323 and CDR-L3 as depicted in SEQ ID NO. 324 and CDR-H1 as depicted in SEQ ID NO. 319, CDR-H2 as depicted in SEQ ID NO. 320 and CDR-H3 as depicted in SEQ ID NO. 321;
(ab) CDR-L1 as depicted in SEQ ID NO. 333, CDR-L2 as depicted in SEQ ID NO. 334 and CDR-L3 as depicted in SEQ ID NO. 335 and CDR-H1 as depicted in SEQ ID NO. 330, CDR-H2 as depicted in SEQ ID NO. 331 and CDR-H3 as depicted in SEQ ID NO. 332;
(ac) CDR-L1 as depicted in SEQ ID NO. 344, CDR-L2 as depicted in SEQ ID NO. 345 and CDR-L3 as depicted in SEQ ID NO. 346 and CDR-H1 as depicted in SEQ ID NO. 341, CDR-H2 as depicted in SEQ ID NO. 342 and CDR-H3 as depicted in SEQ ID NO. 343;
(ad) CDR-L1 as depicted in SEQ ID NO. 355, CDR-L2 as depicted in SEQ ID NO. 356 and CDR-L3 as depicted in SEQ ID NO. 357 and CDR-H1 as depicted in SEQ ID NO. 352, CDR-H2 as depicted in SEQ ID NO. 353 and CDR-H3 as depicted in SEQ ID NO. 354;
(ae) CDR-L1 as depicted in SEQ ID NO. 366, CDR-L2 as depicted in SEQ ID NO. 367 and CDR-L3 as depicted in SEQ ID NO. 368 and CDR-H1 as depicted in SEQ ID NO. 363, CDR-H2 as depicted in SEQ ID NO. 364 and CDR-H3 as depicted in SEQ ID NO. 365;
(af) CDR-L1 as depicted in SEQ ID NO. 377, CDR-L2 as depicted in SEQ ID NO. 378 and CDR-L3 as depicted in SEQ ID NO. 379 and CDR-H1 as depicted in SEQ ID NO. 374, CDR-H2 as depicted in SEQ ID NO. 375 and CDR-H3 as depicted in SEQ ID NO. 376;
(ag) CDR-L1 as depicted in SEQ ID NO. 388, CDR-L2 as depicted in SEQ ID NO. 389 and CDR-L3 as depicted in SEQ ID NO. 390 and CDR-H1 as depicted in SEQ ID NO. 385, CDR-H2 as depicted in SEQ ID NO. 386 and CDR-H3 as depicted in SEQ ID NO. 386;
(ah) CDR-L1 as depicted in SEQ ID NO. 399, CDR-L2 as depicted in SEQ ID NO. 400 and CDR-L3 as depicted in SEQ ID NO. 401 and CDR-H1 as depicted in SEQ ID NO. 396, CDR-H2 as depicted in SEQ ID NO. 397 and CDR-H3 as depicted in SEQ ID NO. 398;
(ai) CDR-L1 as depicted in SEQ ID NO. 410, CDR-L2 as depicted in SEQ ID NO. 411 and CDR-L3 as depicted in SEQ ID NO. 412 and CDR-H1 as depicted in SEQ ID NO. 407, CDR-H2 as depicted in SEQ ID NO. 408 and CDR-H3 as depicted in SEQ ID NO. 409;
(aj) CDR-L1 as depicted in SEQ ID NO. 421, CDR-L2 as depicted in SEQ ID NO. 422 and CDR-L3 as depicted in SEQ ID NO. 423 and CDR-H1 as depicted in SEQ ID NO. 418, CDR-H2 as depicted in SEQ ID NO. 419 and CDR-H3 as depicted in SEQ ID NO. 420;
(ak) CDR-L1 as depicted in SEQ ID NO. 432, CDR-L2 as depicted in SEQ ID NO. 433 and CDR-L3 as depicted in SEQ ID NO. 434 and CDR-H1 as depicted in SEQ ID NO. 429, CDR-H2 as depicted in SEQ ID NO. 430 and CDR-H3 as depicted in SEQ ID NO. 431;
(al) CDR-L1 as depicted in SEQ ID NO. 443, CDR-L2 as depicted in SEQ ID NO. 444 and CDR-L3 as depicted in SEQ ID NO. 445 and CDR-H1 as depicted in SEQ ID NO. 440, CDR-H2 as depicted in SEQ ID NO. 441 and CDR-H3 as depicted in SEQ ID NO. 442;
(am) CDR-L1 as depicted in SEQ ID NO. 454, CDR-L2 as depicted in SEQ ID NO. 455 and CDR-L3 as depicted in SEQ ID NO. 456 and CDR-H1 as depicted in SEQ ID NO. 451, CDR-H2 as depicted in SEQ ID NO. 452 and CDR-H3 as depicted in SEQ ID NO. 453;
(an) CDR-L1 as depicted in SEQ ID NO. 465, CDR-L2 as depicted in SEQ ID NO. 466 and CDR-L3 as depicted in SEQ ID NO. 467 and CDR-H1 as depicted in SEQ ID NO. 462, CDR-H2 as depicted in SEQ ID NO. 463 and CDR-H3 as depicted in SEQ ID NO. 464;
(ao) CDR-L1 as depicted in SEQ ID NO. 476, CDR-L2 as depicted in SEQ ID NO. 477 and CDR-L3 as depicted in SEQ ID NO. 478 and CDR-H1 as depicted in SEQ ID NO. 473, CDR-H2 as depicted in SEQ ID NO. 474 and CDR-H3 as depicted in SEQ ID NO. 475;
(ap) CDR-L1 as depicted in SEQ ID NO. 487, CDR-L2 as depicted in SEQ ID NO. 488 and CDR-L3 as depicted in SEQ ID NO. 489 and CDR-H1 as depicted in SEQ ID NO. 484, CDR-H2 as depicted in SEQ ID NO. 485 and CDR-H3 as depicted in SEQ ID NO. 486;
(aq) CDR-L1 as depicted in SEQ ID NO. 498, CDR-L2 as depicted in SEQ ID NO. 499 and CDR-L3 as depicted in SEQ ID NO. 500, and CDR-H1 as depicted in SEQ ID NO. 495, CDR-H2 as depicted in SEQ ID NO. 496 and CDR-H3 as depicted in SEQ ID NO. 497;
(ar) CDR-L1 as depicted in SEQ ID NO. 509, CDR-L2 as depicted in SEQ ID NO. 510 and CDR-L3 as depicted in SEQ ID NO. 511, and CDR-H1 as depicted in SEQ ID NO. 506, CDR-H2 as depicted in SEQ ID NO. 507 and CDR-H3 as depicted in SEQ ID NO. 508; and
(as) CDR-L1 as depicted in SEQ ID NO. 520, CDR-L2 as depicted in SEQ ID NO. 521 and CDR-L3 as depicted in SEQ ID NO. 522, and CDR-H1 as depicted in SEQ ID NO. 517, CDR-H2 as depicted in SEQ ID NO. 518 and CDR-H3 as depicted in SEQ ID NO. 519; wherein preferred are, for example,
(c) CDR-L1 as depicted in SEQ ID NO. 58, CDR-L2 as depicted in SEQ ID NO. 59 and CDR-L3 as depicted in SEQ ID NO. 60 and CDR-H1 as depicted in SEQ ID NO. 55, CDR-H2 as depicted in SEQ ID NO. 56 and CDR-H3 as depicted in SEQ ID NO. 57;
(n) CDR-L1 as depicted in SEQ ID NO. 179, CDR-L2 as depicted in SEQ ID NO. 180 and CDR-L3 as depicted in SEQ ID NO. 181, and CDR-H1 as depicted in SEQ ID NO. 176, CDR-H2 as depicted in SEQ ID NO. 177 and CDR-H3 as depicted in SEQ ID NO. 178;
(ac) CDR-L1 as depicted in SEQ ID NO. 344, CDR-L2 as depicted in SEQ ID NO. 345 and CDR-L3 as depicted in SEQ ID NO. 346 and CDR-H1 as depicted in SEQ ID NO. 341, CDR-H2 as depicted in SEQ ID NO. 342 and CDR-H3 as depicted in SEQ ID NO. 343; and
(aj) CDR-L1 as depicted in SEQ ID NO. 421, CDR-L2 as depicted in SEQ ID NO. 422 and CDR-L3 as depicted in SEQ ID NO. 423 and CDR-H1 as depicted in SEQ ID NO. 418, CDR-H2 as depicted in SEQ ID NO. 419 and CDR-H3 as depicted in SEQ ID NO. 420.

[0174] It is furthermore envisaged that the first binding domain of the antibody construct of the invention comprises a VH region and a VL region selected from the group consisting of:

(a) a VL region as depicted in SEQ ID NO. 40 and a VH region as depicted in SEQ ID NO. 39;
(b) a VL region as depicted in SEQ ID NO. 51 and a VH region as depicted in SEQ ID NO. 50;
(c) a VL region as depicted in SEQ ID NO. 62 and a VH region as depicted in SEQ ID NO. 61;
(d) a VL region as depicted in SEQ ID NO. 73 and a VH region as depicted in SEQ ID NO. 72;
(e) a VL region as depicted in SEQ ID NO. 84 and a VH region as depicted in SEQ ID NO. 83;
(f) a VL region as depicted in SEQ ID NO. 95 and a VH region as depicted in SEQ ID NO. 94;
(g) a VL region as depicted in SEQ ID NO. 106 and a VH region as depicted in SEQ ID NO. 105;
(h) a VL region as depicted in SEQ ID NO. 117 and a VH region as depicted in SEQ ID NO. 116;
(i) a VL region as depicted in SEQ ID NO. 128 and a VH region as depicted in SEQ ID NO. 127;
(j) a VL region as depicted in SEQ ID NO. 139 and a VH region as depicted in SEQ ID NO. 138;
(k) a VL region as depicted in SEQ ID NO. 150 and a VH region as depicted in SEQ ID NO. 149;
(l) a VL region as depicted in SEQ ID NO. 161 and a VH region as depicted in SEQ ID NO. 160;
(m) a VL region as depicted in SEQ ID NO. 172 and a VH region as depicted in SEQ ID NO. 171;
(n) a VL region as depicted in SEQ ID NO. 183 and a VH region as depicted in SEQ ID NO. 182;
(o) a VL region as depicted in SEQ ID NO. 194 and a VH region as depicted in SEQ ID NO. 193;
(p) a VL region as depicted in SEQ ID NO. 205 and a VH region as depicted in SEQ ID NO. 204;
(q) a VL region as depicted in SEQ ID NO. 216 and a VH region as depicted in SEQ ID NO. 215;
(r) a VL region as depicted in SEQ ID NO. 227 and a VH region as depicted in SEQ ID NO. 226;
(s) a VL region as depicted in SEQ ID NO. 238 and a VH region as depicted in SEQ ID NO. 237;
(t) a VL region as depicted in SEQ ID NO. 249 and a VH region as depicted in SEQ ID NO. 248;
(u) a VL region as depicted in SEQ ID NO. 260 and a VH region as depicted in SEQ ID NO. 259;
(v) a VL region as depicted in SEQ ID NO. 271 and a VH region as depicted in SEQ ID NO. 270;
(w) a VL region as depicted in SEQ ID NO. 282 and a VH region as depicted in SEQ ID NO. 281;
(x) a VL region as depicted in SEQ ID NO. 293 and a VH region as depicted in SEQ ID NO. 292;
(y) a VL region as depicted in SEQ ID NO. 304 and a VH region as depicted in SEQ ID NO. 303;
(z) a VL region as depicted in SEQ ID NO. 315 and a VH region as depicted in SEQ ID NO. 314;
(aa) a VL region as depicted in SEQ ID NO. 326 and a VH region as depicted in SEQ ID NO. 325;
(ab) a VL region as depicted in SEQ ID NO. 337 and a VH region as depicted in SEQ ID NO. 336;
(ac) a VL region as depicted in SEQ ID NO. 348 and a VH region as depicted in SEQ ID NO. 347;
(ad) a VL region as depicted in SEQ ID NO. 359 and a VH region as depicted in SEQ ID NO. 358;
(ae) a VL region as depicted in SEQ ID NO. 370 and a VH region as depicted in SEQ ID NO. 369;
(af) a VL region as depicted in SEQ ID NO. 381 and a VH region as depicted in SEQ ID NO. 380;
(ag) a VL region as depicted in SEQ ID NO. 392 and a VH region as depicted in SEQ ID NO. 391;
(ah) a VL region as depicted in SEQ ID NO. 403 and a VH region as depicted in SEQ ID NO. 402;
(ai) a VL region as depicted in SEQ ID NO. 414 and a VH region as depicted in SEQ ID NO. 413;
(aj) a VL region as depicted in SEQ ID NO. 425 and a VH region as depicted in SEQ ID NO. 424;
(ak) a VL region as depicted in SEQ ID NO. 436 and a VH region as depicted in SEQ ID NO. 435;
(al) a VL region as depicted in SEQ ID NO. 447 and a VH region as depicted in SEQ ID NO. 446;
(am) a VL region as depicted in SEQ ID NO. 458 and a VH region as depicted in SEQ ID NO. 457;
(an) a VL region as depicted in SEQ ID NO. 469 and a VH region as depicted in SEQ ID NO. 468;
(ao) a VL region as depicted in SEQ ID NO. 480 and a VH region as depicted in SEQ ID NO. 479;
(ap) a VL region as depicted in SEQ ID NO. 491 and a VH region as depicted in SEQ ID NO. 490;
(aq) a VL region as depicted in SEQ ID NO. 502 and a VH region as depicted in SEQ ID NO. 501;
(ar) a VL region as depicted in SEQ ID NO. 513 and a VH region as depicted in SEQ ID NO. 512; and
(as) a VL region as depicted in SEQ ID NO. 524 and a VH region as depicted in SEQ ID NO. 523.

[0175] It is furthermore envisaged that the first binding domain of the antibody construct of the invention comprises an amino acid sequence selected from the group consisting of those depicted in SEQ ID NOs: 41, 52, 63, 74, 85, 96, 107, 118, 129, 140, 151, 162, 173, 184, 195, 206, 217, 228, 239, 250, 261, 272, 283, 294, 305, 316, 327, 338, 349, 360, 371, 382, 393, 404, 415, 426, 437, 448, 459, 470, 481, 492, 503, 514, and 525 or having an amino acid sequence having at least 90, 91, 92, 93, 94 95, 96, 97, 98 or 99% identity to said sequences.

[0176] The invention further provides an antibody construct comprising or having an amino acid sequence (full bispecific antibody construct) selected from the group consisting of SEQ ID NO: 42, 43, 53, 54, 64, 65, 75, 76, 86, 87, 97, 98, 108, 109, 119, 120, 130, 131, 141, 142, 152, 153, 163, 164, 174, 175, 185, 186, 196, 197, 207, 208, 218, 219, 229, 230, 240, 241, 251, 252, 262, 263, 273, 274, 284, 285, 295, 296, 306, 307, 317, 318, 328, 329, 339, 340, 350, 351, 361, 362, 372, 373, 383, 384, 394, 395, 405, 406, 416, 417, 427, 428, 438, 439, 449, 450, 460, 461, 471, 472, 482, 483, 493, 494, 504, 505, 515, 516, 526 and 527, or having an amino acid sequence having at least 90, 91, 92, 93, 94 95, 96, 97, 98 or 99% identity to said sequences.

[0177] Covalent modifications of the antibody constructs are also included within the scope of this invention, and are generally, but not always, done post-translationally. For example, several types of covalent modifications of the antibody construct are introduced into the molecule by reacting specific amino acid residues of the antibody construct with an organic derivatizing agent that is capable of reacting with selected side chains or the N- or C-terminal residues.

[0178] Cysteinyl residues most commonly are reacted with α-haloacetates (and corresponding amines), such as chloroacetic acid or chloroacetamide, to give carboxymethyl or carboxyamidomethyl derivatives. Cysteinyl residues also are derivatized by reaction with bromotrifluoroacetone, α-bromo-β-(5-imidozoyl)propionic acid, chloroacetyl phosphate, N-alkylmaleimides, 3-nitro-2-pyridyl disulfide, methyl 2-pyridyl disulfide, p-chloromercuribenzoate, 2-chloromercuri-4-nitrophenol, or chloro-7-nitrobenzo-2-oxa-1,3-diazole.

[0179] Histidyl residues are derivatized by reaction with diethylpyrocarbonate at pH 5.5-7.0 because this agent is relatively specific for the histidyl side chain. Para-bromophenacyl bromide also is useful; the reaction is preferably performed in 0.1 M sodium cacodylate at pH 6.0. Lysinyl and amino terminal residues are reacted with succinic or other carboxylic acid anhydrides. Derivatization with these agents has the effect of reversing the charge of the lysinyl residues. Other suitable reagents for derivatizing alpha-amino-containing residues include imidoesters such as methyl picolinimidate; pyridoxal phosphate; pyridoxal; chloroborohydride; trinitrobenzenesulfonic acid; O-methylisourea; 2,4-pentanedione; and transaminase-catalyzed reaction with glyoxylate.

[0180] Arginyl residues are modified by reaction with one or several conventional reagents, among them phenylglyoxal, 2,3-butanedione, 1,2-cyclohexanedione, and ninhydrin. Derivatization of arginine residues requires that the reaction be performed in alkaline conditions because of the high pKa of the guanidine functional group. Furthermore, these reagents may react with the groups of lysine as well as the arginine epsilon-amino group.

[0181] The specific modification of tyrosyl residues may be made, with particular interest in introducing spectral labels into tyrosyl residues by reaction with aromatic diazonium compounds or tetranitromethane. Most commonly, N-acetylimidizole and tetranitromethane are used to form 0-acetyl tyrosyl species and 3-nitro derivatives, respectively. Tyrosyl residues are iodinated using ¹²⁵I or ¹³¹I to prepare labeled proteins for use in radioimmunoassay, the chloramine T method described above being suitable.

[0182] Carboxyl side groups (aspartyl or glutamyl) are selectively modified by reaction with carbodiimides (R′—N═C═N—R′), where R and R′ are optionally different alkyl groups, such as 1-cyclohexyl-3-(2-morpholinyl-4-ethyl) carbodiimide or 1-ethyl-3-(4-azonia-4,4-dimethylpentyl) carbodiimide. Furthermore, aspartyl and glutamyl residues are converted to asparaginyl and glutaminyl residues by reaction with ammonium ions.

[0183] Derivatization with bifunctional agents is useful for crosslinking the antibody constructs of the present invention to a water-insoluble support matrix or surface for use in a variety of methods. Commonly used crosslinking agents include, e.g., 1,1-bis(diazoacetyl)-2-phenylethane, glutaraldehyde, N-hydroxysuccinimide esters, for example, esters with 4-azidosalicylic acid, homobifunctional imidoesters, including disuccinimidyl esters such as 3,3′-dithiobis(succinimidylpropionate), and bifunctional maleimides such as bis-N-maleimido-1,8-octane. Derivatizing agents such as methyl-3-[(p-azidophenyl)dithio]propioimidate yield photoactivatable intermediates that are capable of forming crosslinks in the presence of light. Alternatively, reactive water-insoluble matrices such as cyanogen bromide-activated carbohydrates and the reactive substrates as described in U.S. Pat. Nos. 3,969,287; 3,691,016; 4,195,128; 4,247,642; 4,229,537; and 4,330,440 are employed for protein immobilization.

[0184] Glutaminyl and asparaginyl residues are frequently deamidated to the corresponding glutamyl and aspartyl residues, respectively. Alternatively, these residues are deamidated under mildly acidic conditions. Either form of these residues falls within the scope of this invention.

[0185] Other modifications include hydroxylation of proline and lysine, phosphorylation of hydroxyl groups of seryl or threonyl residues, methylation of the α-amino groups of lysine, arginine, and histidine side chains (T. E. Creighton, Proteins: Structure and Molecular Properties, W. H. Freeman & Co., San Francisco, 1983, pp. 79-86), acetylation of the N-terminal amine, and amidation of any C-terminal carboxyl group.

[0186] Another type of covalent modification of the antibody constructs included within the scope of this invention comprises altering the glycosylation pattern of the protein. As is known in the art, glycosylation patterns can depend on both the sequence of the protein (e.g., the presence or absence of particular glycosylation amino acid residues, discussed below), or the host cell or organism in which the protein is produced. Particular expression systems are discussed below.

[0187] Glycosylation of polypeptides is typically either N-linked or O-linked. N-linked refers to the attachment of the carbohydrate moiety to the side chain of an asparagine residue. The tri-peptide sequences asparagine-X-serine and asparagine-X-threonine, where X is any amino acid except proline, are the recognition sequences for enzymatic attachment of the carbohydrate moiety to the asparagine side chain. Thus, the presence of either of these tri-peptide sequences in a polypeptide creates a potential glycosylation site. O-linked glycosylation refers to the attachment of one of the sugars N-acetylgalactosamine, galactose, or xylose, to a hydroxyamino acid, most commonly serine or threonine, although 5-hydroxyproline or 5-hydroxylysine may also be used.

[0188] Addition of glycosylation sites to the antibody construct is conveniently accomplished by altering the amino acid sequence such that it contains one or more of the above-described tri-peptide sequences (for N-linked glycosylation sites). The alteration may also be made by the addition of, or substitution by, one or more serine or threonine residues to the starting sequence (for O-linked glycosylation sites). For ease, the amino acid sequence of an antibody construct is preferably altered through changes at the DNA level, particularly by mutating the DNA encoding the polypeptide at preselected bases such that codons are generated that will translate into the desired amino acids.

[0189] Another means of increasing the number of carbohydrate moieties on the antibody construct is by chemical or enzymatic coupling of glycosides to the protein. These procedures are advantageous in that they do not require production of the protein in a host cell that has glycosylation capabilities for N- and O-linked glycosylation. Depending on the coupling mode used, the sugar(s) may be attached to (a) arginine and histidine, (b) free carboxyl groups, (c) free sulfhydryl groups such as those of cysteine, (d) free hydroxyl groups such as those of serine, threonine, or hydroxyproline, (e) aromatic residues such as those of phenylalanine, tyrosine, or tryptophan, or (f) the amide group of glutamine. These methods are described in WO 87/05330, and in Aplin and Wriston, 1981, CRC Crit. Rev. Biochem., pp. 259-306.

[0190] Removal of carbohydrate moieties present on the starting antibody construct may be accomplished chemically or enzymatically. Chemical deglycosylation requires exposure of the protein to the compound trifluoromethanesulfonic acid, or an equivalent compound. This treatment results in the cleavage of most or all sugars except the linking sugar (N-acetylglucosamine or N-acetylgalactosamine), while leaving the polypeptide intact. Chemical deglycosylation is described by Hakimuddin et al., 1987, Arch. Biochem. Biophys. 259:52 and by Edge et al., 1981, Anal. Biochem. 118:131. Enzymatic cleavage of carbohydrate moieties on polypeptides can be achieved by the use of a variety of endo- and exo-glycosidases as described by Thotakura et al., 1987, Meth. Enzymol. 138:350. Glycosylation at potential glycosylation sites may be prevented by the use of the compound tunicamycin as described by Duskin et al., 1982, J. Biol. Chem. 257:3105. Tunicamycin blocks the formation of protein-N-glycoside linkages.

[0191] Other modifications of the antibody construct are also contemplated herein. For example, another type of covalent modification of the antibody construct comprises linking the antibody construct to various non-proteinaceous polymers, including, but not limited to, various polyols such as polyethylene glycol, polypropylene glycol, polyoxyalkylenes, or copolymers of polyethylene glycol and polypropylene glycol, in the manner set forth in U.S. Pat. Nos. 4,640,835; 4,496,689; 4,301,144; 4,670,417; 4,791,192 or 4,179,337. In addition, as is known in the art, amino acid substitutions may be made in various positions within the antibody construct, e.g. in order to facilitate the addition of polymers such as PEG.

[0192] In some embodiments, the covalent modification of the antibody constructs of the invention comprises the addition of one or more labels. The labelling group may be coupled to the antibody construct via spacer arms of various lengths to reduce potential steric hindrance. Various methods for labelling proteins are known in the art and can be used in performing the present invention. The term “label” or “labelling group” refers to any detectable label. In general, labels fall into a variety of classes, depending on the assay in which they are to be detected—the following examples include, but are not limited to:
[0193] a) isotopic labels, which may be radioactive or heavy isotopes, such as radioisotopes or radionuclides (e.g., ³H, ¹⁴C, ¹⁵N, ³⁵S, ⁸⁹Zr, ⁹⁰Y, ⁹⁹Tc, ¹¹¹In, ¹²⁵I, ¹³¹I)
[0194] b) magnetic labels (e.g., magnetic particles)
[0195] c) redox active moieties
[0196] d) optical dyes (including, but not limited to, chromophores, phosphors and fluorophores) such as fluorescent groups (e.g., FITC, rhodamine, lanthanide phosphors), chemiluminescent groups, and fluorophores which can be either “small molecule” fluors or proteinaceous fluors
[0197] e) enzymatic groups (e.g. horseradish peroxidase, β-galactosidase, luciferase, alkaline phosphatase)
[0198] f) biotinylated groups
[0199] g) predetermined polypeptide epitopes recognized by a secondary reporter (e.g., leucine zipper pair sequences, binding sides for secondary antibodies, metal binding domains, epitope tags, etc.)

[0200] By “fluorescent label” is meant any molecule that may be detected via its inherent fluorescent properties. Suitable fluorescent labels include, but are not limited to, fluorescein, rhodamine, tetramethylrhodamine, eosin, erythrosin, coumarin, methyl-coumarins, pyrene, Malacite green, stilbene, Lucifer Yellow, Cascade BlueJ, Texas Red, IAEDANS, EDANS, BODIPY FL, LC Red 640, Cy 5, Cy 5.5, LC Red 705, Oregon green, the Alexa-Fluor dyes (Alexa Fluor 350, Alexa Fluor 430, Alexa Fluor 488, Alexa Fluor 546, Alexa Fluor 568, Alexa Fluor 594, Alexa Fluor 633, Alexa Fluor 660, Alexa Fluor 680), Cascade Blue, Cascade Yellow and R-phycoerythrin (PE) (Molecular Probes, Eugene, Oreg.), FITC, Rhodamine, and Texas Red (Pierce, Rockford, Ill.), Cy5, Cy5.5, Cy7 (Amersham Life Science, Pittsburgh, Pa.). Suitable optical dyes, including fluorophores, are described in Molecular Probes Handbook by Richard P. Haugland.

[0201] Suitable proteinaceous fluorescent labels also include, but are not limited to, green fluorescent protein, including a Renilla, Ptilosarcus, or Aequorea species of GFP (Chalfie et al., 1994, Science 263:802-805), EGFP (Clontech Laboratories, Inc., Genbank Accession Number U55762), blue fluorescent protein (BFP, Quantum Biotechnologies, Inc. 1801 de Maisonneuve Blvd. West, 8th Floor, Montreal, Quebec, Canada H3H 1J9; Stauber, 1998, Biotechniques 24:462-471; Heim et al., 1996, Curr. Biol. 6:178-182), enhanced yellow fluorescent protein (EYFP, Clontech Laboratories, Inc.), luciferase (Ichiki et al., 1993, J. Immunol. 150:5408-5417), β galactosidase (Nolan et al., 1988, Proc. Natl. Acad. Sci. U.S.A. 85:2603-2607) and Renilla (WO92/15673, WO95/07463, WO98/14605, WO98/26277, WO99/49019, U.S. Pat. Nos. 5,292,658; 5,418,155; 5,683,888; 5,741,668; 5,777,079; 5,804,387; 5,874,304; 5,876,995; 5,925,558).

[0202] The antibody construct of the invention may also comprise additional domains, which are e.g. helpful in the isolation of the molecule or relate to an adapted pharmacokinetic profile of the molecule. Domains helpful for the isolation of an antibody construct may be selected from peptide motives or secondarily introduced moieties, which can be captured in an isolation method, e.g. an isolation column. Non-limiting embodiments of such additional domains comprise peptide motives known as Myc-tag, HAT-tag, HA-tag, TAP-tag, GST-tag, chitin binding domain (CBD-tag), maltose binding protein (MBP-tag), Flag-tag, Strep-tag and variants thereof (e.g. Strepll-tag) and His-tag. All herein disclosed antibody constructs may comprise a His-tag domain, which is generally known as a repeat of consecutive His residues in the amino acid sequence of a molecule, preferably of five, and more preferably of six His residues (hexa-histidine). The His-tag may be located e.g. at the N- or C-terminus of the antibody construct, preferably it is located at the C-terminus. Most preferably, a hexa-histidine tag (HHHHHH) (SEQ ID NO:16) is linked via peptide bond to the C-terminus of the antibody construct according to the invention. Additionally, a conjugate system of PLGA-PEG-PLGA may be combined with a poly-histidine tag for sustained release application and improved pharmacokinetic profile.

[0203] Amino acid sequence modifications of the antibody constructs described herein are also contemplated. For example, it may be desirable to improve the binding affinity and/or other biological properties of the antibody construct Amino acid sequence variants of the antibody constructs are prepared by introducing appropriate nucleotide changes into the antibody constructs nucleic acid, or by peptide synthesis. All of the below described amino acidacid sequence modifications should result in an antibody construct which still retains the desired biological activity (binding to MUC17 and to CD3) of the unmodified parental molecule.

[0204] The term “amino acid” or “amino acid residue” typically refers to an amino acid having its art recognized definition such as an amino acid selected from the group consisting of: alanine (Ala or A); arginine (Arg or R); asparagine (Asn or N); aspartic acid (Asp or D); cysteine (Cys or C); glutamine (GIn or Q); glutamic acid (Glu or E); glycine (Gly or G); histidine (His or H); isoleucine (He or I): leucine (Leu or L); lysine (Lys or K); methionine (Met or M); phenylalanine (Phe or F); pro line (Pro or P); serine (Ser or S); threonine (Thr or T); tryptophan (Trp or W); tyrosine (Tyr or Y); and valine (Val or V), although modified, synthetic, or rare amino acids may be used as desired. Generally, amino acids can be grouped as having a nonpolar side chain (e.g., Ala, Cys, He, Leu, Met, Phe, Pro, Val); a negatively charged side chain (e.g., Asp, Glu); a positively charged sidechain (e.g., Arg, His, Lys); or an uncharged polar side chain (e.g., Asn, Cys, GIn, Gly, His, Met, Phe, Ser, Thr, Trp, and Tyr).

[0205] Amino acid modifications include, for example, deletions from, and/or insertions into, and/or substitutions of, residues within the amino acid sequences of the antibody constructs. Any combination of deletion, insertion, and substitution is made to arrive at the final construct, provided that the final construct possesses the desired characteristics. The amino acid changes also may alter post-translational processes of the antibody constructs, such as changing the number or position of glycosylation sites.

[0206] For example, 1, 2, 3, 4, 5, or 6 amino acids may be inserted, substituted or deleted in each of the CDRs (of course, dependent on their length), while 1, 2, 3, 4, 5, 6, 7, 8, 9, 10, 11, 12, 13, 14, 15, 16, 17, 18, 19, 20, or 25 amino acids may be inserted, substituted or deleted in each of the FRs. Preferably, amino acid sequence insertions into the antibody construct include amino- and/or carboxyl-terminal fusions ranging in length from 1, 2, 3, 4, 5, 6, 7, 8, 9 or 10 residues to polypeptides containing a hundred or more residues, as well as intra-sequence insertions of single or multiple amino acid residues. Corresponding modifications may also performed within the third domain of the antibody construct of the invention. An insertional variant of the antibody construct of the invention includes the fusion to the N-terminus or to the C-terminus of the antibody construct of an enzyme or the fusion to a polypeptide.

[0207] The sites of greatest interest for substitutional mutagenesis include (but are not limited to) the CDRs of the heavy and/or light chain, in particular the hypervariable regions, but FR alterations in the heavy and/or light chain are also contemplated. The substitutions are preferably conservative substitutions as described herein. Preferably, 1, 2, 3, 4, 5, 6, 7, 8, 9, or 10 amino acids may be substituted in a CDR, while 1, 2, 3, 4, 5, 6, 7, 8, 9, 10, 11, 12, 13, 14, 15, 16, 17, 18, 19, 20, or 25 amino acids may be substituted in the framework regions (FRs), depending on the length of the CDR or FR. For example, if a CDR sequence encompasses 6 amino acids, it is envisaged that one, two or three of these amino acids are substituted. Similarly, if a CDR sequence encompasses 15 amino acids it is envisaged that one, two, three, four, five or six of these amino acids are substituted.

[0208] A useful method for identification of certain residues or regions of the antibody constructs that are preferred locations for mutagenesis is called “alanine scanning mutagenesis” as described by Cunningham and Wells in Science, 244: 1081-1085 (1989). Here, a residue or group of target residues within the antibody construct is/are identified (e.g. charged residues such as arg, asp, his, lys, and glu) and replaced by a neutral or negatively charged amino acid (most preferably alanine or polyalanine) to affect the interaction of the amino acids with the epitope.

[0209] Those amino acid locations demonstrating functional sensitivity to the substitutions are then refined by introducing further or other variants at, or for, the sites of substitution. Thus, while the site or region for introducing an amino acid sequence variation is predetermined, the nature of the mutation per se needs not to be predetermined. For example, to analyze or optimize the performance of a mutation at a given site, alanine scanning or random mutagenesis may be conducted at a target codon or region, and the expressed antibody construct variants are screened for the optimal combination of desired activity. Techniques for making substitution mutations at predetermined sites in the DNA having a known sequence are well known, for example, M13 primer mutagenesis and PCR mutagenesis. Screening of the mutants is done using assays of antigen binding activities, such as MUC17 or CD3 binding.

[0210] Generally, if amino acids are substituted in one or more or all of the CDRs of the heavy and/or light chain, it is preferred that the then-obtained “substituted” sequence is at least 60% or 65%, more preferably 70% or 75%, even more preferably 80% or 85%, and particularly preferably 90% or 95% identical to the “original” CDR sequence. This means that it is dependent of the length of the CDR to which degree it is identical to the “substituted” sequence. For example, a CDR having 5 amino acids is preferably 80% identical to its substituted sequence in order to have at least one amino acid substituted. Accordingly, the CDRs of the antibody construct may have different degrees of identity to their substituted sequences, e.g., CDRL1 may have 80%, while CDRL3 may have 90%.

[0211] Preferred substitutions (or replacements) are conservative substitutions. However, any substitution (including non-conservative substitution or one or more from the “exemplary substitutions” listed in Table 3, below) is envisaged as long as the antibody construct retains its capability to bind to MUC17 via the first domain and to CD3 epsilon via the second domain and/or its CDRs have an identity to the then substituted sequence (at least 60% or 65%, more preferably 70% or 75%, even more preferably 80% or 85%, and particularly preferably 90% or 95% identical to the “original” CDR sequence).

[0212] Conservative substitutions are shown in Table 3 under the heading of “preferred substitutions”. If such substitutions result in a change in biological activity, then more substantial changes, denominated “exemplary substitutions” in Table 3, or as further described below in reference to amino acid classes, may be introduced and the products screened for a desired characteristic.

TABLE 3
Amino acid substitutions

| | Exemplary | Preferred |
|---|---|---|
| Original | Substitutions | Substitutions |
| Ala (A) | val, leu, ile | Val |
| Arg (R) | lys, gln, asn | Lys |
| Asn (N) | gln, his, asp, lys, | Gln |
| | arg | |
| Asp (D) | glu, asn | Glu |
| Cys (C) | ser, ala | ser |
| Gln (Q) | asn, glu | asn |
| Glu (E) | asp, gln | asp |
| Gly (G) | Ala | ala |
| His (H) | asn, gln, lys, arg | arg |
| Ile (I) | leu, val, met, ala, | leu |
| | phe | |
| Leu (L) | norleucine, ile, val, | ile |
| | met, ala | |
| Lys (K) | arg, gln, asn | arg |
| Met (M) | leu, phe, ile | leu |
| Phe (F) | leu, val, ile, ala, | tyr |
| | tyr | |
| Pro (P) | Ala | ala |
| Ser (S) | Thr | thr |
| Thr (T) | Ser | ser |
| Trp (W) | tyr, phe | tyr |
| Tyr (Y) | trp, phe, thr, ser | phe |
| Val (V) | ile, leu, met, phe, | leu |
| | ala | |

[0213] Substantial modifications in the biological properties of the antibody construct of the present invention are accomplished by selecting substitutions that differ significantly in their effect on maintaining (a) the structure of the polypeptide backbone in the area of the substitution, for example, as a sheet or helical conformation, (b) the charge or hydrophobicity of the molecule at the target site, or (c) the bulk of the side chain. Naturally occurring residues are divided into groups based on common side-chain properties: (1) hydrophobic: norleucine, met, ala, val, leu, ile; (2) neutral hydrophilic: cys, ser, thr; asn, gln (3) acidic: asp, glu; (4) basic: his, lys, arg; (5) residues that influence chain orientation: gly, pro; and (6) aromatic: trp, tyr, phe.

[0214] Non-conservative substitutions will entail exchanging a member of one of these classes for another class. Any cysteine residue not involved in maintaining the proper conformation of the antibody construct may be substituted, generally with serine, to improve the oxidative stability of the molecule and prevent aberrant crosslinking Conversely, cysteine bond(s) may be added to the antibody to improve its stability (particularly where the antibody is an antibody fragment such as an Fv fragment).

[0215] For amino acid sequences, sequence identity and/or similarity is determined by using standard techniques known in the art, including, but not limited to, the local sequence identity algorithm of Smith and Waterman, 1981, Adv. Appl. Math. 2:482, the sequence identity alignment algorithm of Needleman and Wunsch, 1970, J. Mol. Biol. 48:443, the search for similarity method of Pearson and Lipman, 1988, Proc. Nat. Acad. Sci. U.S.A. 85:2444, computerized implementations of these algorithms (GAP, BESTFIT, FASTA, and TFASTA in the Wisconsin Genetics Software Package, Genetics Computer Group, 575 Science Drive, Madison, Wis.), the Best Fit sequence program described by Devereux et al., 1984, Nucl. Acid Res. 12:387-395, preferably using the default settings, or by inspection. Preferably, percent identity is calculated by FastDB based upon the following parameters: mismatch penalty of 1; gap penalty of 1; gap size penalty of 0.33; and joining penalty of 30, “Current Methods in Sequence Comparison and Analysis,” Macromolecule Sequencing and Synthesis, Selected Methods and Applications, pp 127-149 (1988), Alan R. Liss, Inc.

[0216] An example of a useful algorithm is PILEUP. PILEUP creates a multiple sequence alignment from a group of related sequences using progressive, pairwise alignments. It can also plot a tree showing the clustering relationships used to create the alignment. PILEUP uses a simplification of the progressive alignment method of Feng & Doolittle, 1987, J. Mol. Evol. 35:351-360; the method is similar to that described by Higgins and Sharp, 1989, CABIOS 5:151-153. Useful PILEUP parameters including a default gap weight of 3.00, a default gap length weight of 0.10, and weighted end gaps.

[0217] Another example of a useful algorithm is the BLAST algorithm, described in: Altschul et al., 1990, J. Mol. Biol. 215:403-410; Altschul et al., 1997, Nucleic Acids Res. 25:3389-3402; and Karin et al., 1993, Proc. Natl. Acad. Sci. U.S.A. 90:5873-5787. A particularly useful BLAST program is the WU-BLAST-2 program which was obtained from Altschul et al., 1996, Methods in Enzymology 266:460-480. WU-BLAST-2 uses several search parameters, most of which are set to the default values. The adjustable parameters are set with the following values: overlap span=1, overlap fraction=0.125, word threshold (T)=II. The HSP S and HSP S2 parameters are dynamic values and are established by the program itself depending upon the composition of the particular sequence and composition of the particular database against which the sequence of interest is being searched; however, the values may be adjusted to increase sensitivity.

[0218] An additional useful algorithm is gapped BLAST as reported by Altschul et al., 1993, Nucl. Acids Res. 25:3389-3402. Gapped BLAST uses BLOSUM-62 substitution scores; threshold T parameter set to 9; the two-hit method to trigger ungapped extensions, charges gap lengths of k a cost of 10+k; Xu set to 16, and Xg set to 40 for database search stage and to 67 for the output stage of the algorithms. Gapped alignments are triggered by a score corresponding to about 22 bits.

[0219] Generally, the amino acid homology, similarity, or identity between individual variant CDRs or VH/VL sequences are at least 60% to the sequences depicted herein, and more typically with preferably increasing homologies or identities of at least 65% or 70%, more preferably at least 75% or 80%, even more preferably at least 85%, 90%, 91%, 92%, 93%, 94%, 95%, 96%, 97%, 98%, 99%, and almost 100%. In a similar manner, “percent (%) nucleic acid sequence identity” with respect to the nucleic acid sequence of the binding proteins identified herein is defined as the percentage of nucleotide residues in a candidate sequence that are identical with the nucleotide residues in the coding sequence of the antibody construct. A specific method utilizes the BLASTN module of WU-BLAST-2 set to the default parameters, with overlap span and overlap fraction set to 1 and 0.125, respectively.

[0220] Generally, the nucleic acid sequence homology, similarity, or identity between the nucleotide sequences encoding individual variant CDRs or VH/VL sequences and the nucleotide sequences depicted herein are at least 60%, and more typically with preferably increasing homologies or identities of at least 65%, 70%, 75%, 80%, 81%, 82%, 83%, 84%, 85%, 86%, 87%, 88%, 89%, 90%, 91%, 92%, 93%, 94%, 95%, 96%, 97%, 98%, or 99%, and almost 100%. Thus, a “variant CDR” or a “variant VH/VL region” is one with the specified homology, similarity, or identity to the parent CDR/VH/VL of the invention, and shares biological function, including, but not limited to, at least 60%, 65%, 70%, 75%, 80%, 81%, 82%, 83%, 84%, 85%, 86%, 87%, 88%, 89%, 90%, 91%, 92%, 93%, 94%, 95%, 96%, 97%, 98%, or 99% of the specificity and/or activity of the parent CDR or VH/VL.

[0221] In one embodiment, the percentage of identity to human germline of the antibody constructs according to the invention is ≥70% or ≥75%, more preferably ≥80% or ≥85%, even more preferably ≥90%, and most preferably ≥91%, ≥92%, ≥93%, ≥94%, ≥95% or even ≥96%. Identity to human antibody germline gene products is thought to be an important feature to reduce the risk of therapeutic proteins to elicit an immune response against the drug in the patient during treatment. Hwang & Foote (“Immunogenicity of engineered antibodies”; Methods 36 (2005) 3-10) demonstrate that the reduction of non-human portions of drug antibody constructs leads to a decrease of risk to induce anti-drug antibodies in the patients during treatment. By comparing an exhaustive number of clinically evaluated antibody drugs and the respective immunogenicity data, the trend is shown that humanization of the V-regions of antibodies makes the protein less immunogenic (average 5.1% of patients) than antibodies carrying unaltered non-human V regions (average 23.59% of patients). A higher degree of identity to human sequences is hence desirable for V-region based protein therapeutics in the form of antibody constructs. For this purpose of determining the germline identity, the V-regions of VL can be aligned with the amino acid sequences of human germline V segments and J segments (http://vbase.mrc-cpe.cam.ac.uk/) using Vector NTI software and the amino acid sequence calculated by dividing the identical amino acid residues by the total number of amino acid residues of the VL in percent. The same can be for the VH segments (http://vbase.mrc-cpe.cam.ac.uk/) with the exception that the VH CDR3 may be excluded due to its high diversity and a lack of existing human germline VH CDR3 alignment partners. Recombinant techniques can then be used to increase sequence identity to human antibody germline genes.

[0222] In a further embodiment, the bispecific antibody constructs of the present invention exhibit high monomer yields under standard research scale conditions, e.g., in a standard two-step purification process. Preferably the monomer yield of the antibody constructs according to the invention is ≥0.25 mg/L supernatant, more preferably ≥0.5 mg/L, even more preferably ≥1 mg/L, and most preferably ≥3 mg/L supernatant.

[0223] Likewise, the yield of the dimeric antibody construct isoforms and hence the monomer percentage (i.e., monomer: (monomer+dimer)) of the antibody constructs can be determined. The productivity of monomeric and dimeric antibody constructs and the calculated monomer percentage can e.g. be obtained in the SEC purification step of culture supernatant from standardized research-scale production in roller bottles. In one embodiment, the monomer percentage of the antibody constructs is ≥80%, more preferably ≥85%, even more preferably ≥90%, and most preferably ≥95%.

[0224] In one embodiment, the antibody constructs have a preferred plasma stability (ratio of EC₅₀ with plasma to EC₅₀ w/o plasma) of ≤5 or ≤4, more preferably ≤3.5 or ≤3, even more preferably ≤2.5 or ≤2, and most preferably ≤1.5 or ≤1. The plasma stability of an antibody construct can be tested by incubation of the construct in human plasma at 37° C. for 24 hours followed by EC₅₀ determination in a⁵¹ chromium release cytotoxicity assay. The effector cells in the cytotoxicity assay can be stimulated enriched human CD8 positive T cells. Target cells can e.g. be CHO cells transfected with human MUC17. The effector to target cell (E:T) ratio can be chosen as 10:1 or 5:1. The human plasma pool used for this purpose is derived from the blood of healthy donors collected by EDTA coated syringes. Cellular components are removed by centrifugation and the upper plasma phase is collected and subsequently pooled. As control, antibody constructs are diluted immediately prior to the cytotoxicity assay in RPMI-1640 medium. The plasma stability is calculated as ratio of EC₅₀ (after plasma incubation) to EC₅₀ (control).

[0225] It is furthermore preferred that the monomer to dimer conversion of antibody constructs of the invention is low. The conversion can be measured under different conditions and analyzed by high performance size exclusion chromatography. For example, incubation of the monomeric isoforms of the antibody constructs can be carried out for 7 days at 37° C. and concentrations of e.g. 100 μg/ml or 250 μg/ml in an incubator. Under these conditions, it is preferred that the antibody constructs of the invention show a dimer percentage that is ≤5%, more preferably ≤4%, even more preferably ≤3%, even more preferably ≤2.5%, even more preferably ≤2%, even more preferably ≤1.5%, and most preferably ≤1% or ≤0.5% or even 0%.

[0226] It is also preferred that the bispecific antibody constructs of the present invention present with very low dimer conversion after a number of freeze/thaw cycles. For example, the antibody construct monomer is adjusted to a concentration of 250 μg/ml e.g. in generic formulation buffer and subjected to three freeze/thaw cycles (freezing at −80° C. for 30 min followed by thawing for 30 min at room temperature), followed by high performance SEC to determine the percentage of initially monomeric antibody construct, which had been converted into dimeric antibody construct. Preferably the dimer percentages of the bispecific antibody constructs are ≤5%, more preferably ≤4%, even more preferably ≤3%, even more preferably ≤2.5%, even more preferably ≤2%, even more preferably ≤1.5%, and most preferably ≤1% or even ≤0.5%, for example after three freeze/thaw cycles.

[0227] The bispecific antibody constructs of the present invention preferably show a favorable thermostability with aggregation temperatures ≥45° C. or ≥50° C., more preferably ≥52° C. or ≥54° C., even more preferably ≥56° C. or ≥57° C., and most preferably ≥58° C. or ≥59° C. The thermostability parameter can be determined in terms of antibody aggregation temperature as follows: Antibody solution at a concentration 250 μg/ml is transferred into a single use cuvette and placed in a Dynamic Light Scattering (DLS) device. The sample is heated from 40° C. to 70° C. at a heating rate of 0.5° C./min with constant acquisition of the measured radius. Increase of radius indicating melting of the protein and aggregation is used to calculate the aggregation temperature of the antibody.

[0228] Alternatively, temperature melting curves can be determined by Differential Scanning calorimetry (DSC) to determine intrinsic biophysical protein stabilities of the antibody constructs. These experiments are performed using a MicroCal LLC (Northampton, Mass., U.S.A) VP-DSC device. The energy uptake of a sample containing an antibody construct is recorded from 20° C. to 90° C. compared to a sample containing only the formulation buffer. The antibody constructs are adjusted to a final concentration of 250 μg/ml e.g. in SEC running buffer. For recording of the respective melting curve, the overall sample temperature is increased stepwise. At each temperature T energy uptake of the sample and the formulation buffer reference is recorded. The difference in energy uptake Cp (kcal/mole/° C.) of the sample minus the reference is plotted against the respective temperature. The melting temperature is defined as the temperature at the first maximum of energy uptake.

[0229] The MUC17×CD3 bispecific antibody constructs of the invention are also envisaged to have a turbidity (as measured by OD340 after concentration of purified monomeric antibody construct to 2.5 mg/ml and overnight incubation) of ≤0.2, preferably of ≤0.15, more preferably of ≤0.12, even more preferably of ≤0.1, and most preferably of ≤0.08.

[0230] In a further embodiment the antibody construct according to the invention is stable at physiologic or slightly lower pH, i.e. about pH 7.4 to 6.0. The more tolerant the antibody construct behaves at unphysiologic pH such as about pH 6.0, the higher is the recovery of the antibody construct eluted from an ion exchange column relative to the total amount of loaded protein. Recovery of the antibody construct from an ion (e.g., cation) exchange column at about pH 6.0 is preferably ≥30%, more preferably ≥40%, more preferably ≥50%, even more preferably ≥60%, even more preferably ≥70%, even more preferably ≥80%, even more preferably ≥90%, even more preferably ≥95%, and most preferably ≥99%.

[0231] It is furthermore envisaged that the bispecific antibody constructs of the present invention exhibit therapeutic efficacy or anti-tumor activity. This can e.g. be assessed in a study as disclosed in the following generalized example of an advanced stage human tumor xenograft model:

[0232] On day 1 of the study, 5×10⁶ cells of a human target cell antigen (here: MUC17) positive cancer cell line are subcutaneously injected in the right dorsal flank of female NOD/SCID mice. When the mean tumor volume reaches about 100 mm³, in vitro expanded human CD3 positive T cells are transplanted into the mice by injection of about 2×10⁷ cells into the peritoneal cavity of the animals. Mice of vehicle control group 1 do not receive effector cells and are used as an untransplanted control for comparison with vehicle control group 2 (receiving effector cells) to monitor the impact of T cells alone on tumor growth. The antibody treatment starts when the mean tumor volume reaches about 200 mm³. The mean tumor size of each treatment group on the day of treatment start should not be statistically different from any other group (analysis of variance). Mice are treated with 0.5 mg/kg/day of a MUC17×CD3 bispecific antibody construct by intravenous bolus injection for about 15 to 20 days. Tumors are measured by caliper during the study and progress evaluated by intergroup comparison of tumor volumes (TV). The tumor growth inhibition T/C [%] is determined by calculating TV as T/C %=100×(median TV of analyzed group)/(median TV of control group 2).

[0233] The skilled person knows how to modify or adapt certain parameters of this study, such as the number of injected tumor cells, the site of injection, the number of transplanted human T cells, the amount of bispecific antibody constructs to be administered, and the timelines, while still arriving at a meaningful and reproducible result. Preferably, the tumor growth inhibition T/C [%] is ≤70 or ≤60, more preferably ≤50 or ≤40, even more preferably ≤30 or ≤20 and most preferably ≤10 or ≤5 or even ≤2.5. Tumor growth inhibition is preferably close to 100%.

[0234] In a preferred embodiment of the antibody construct of the invention the antibody construct is a single chain antibody construct.

[0235] Also in a preferred embodiment of the antibody construct of the invention said third domain comprises in an amino to carboxyl order:

[0236] hinge-CH2-CH3-linker-hinge-CH2-CH3.

[0237] In one embodiment of the invention each of said polypeptide monomers of the third domain has an amino acid sequence that is at least 90% identical to a sequence selected from the group consisting of: SEQ ID NO: 17-24. In a preferred embodiment or the invention each of said polypeptide monomers has an amino acid sequence selected from SEQ ID NO: 17-24.

[0238] Also in one embodiment of the invention the CH2 domain of one or preferably each (both) polypeptide monomers of the third domain comprises an intra domain cysteine disulfide bridge. As known in the art the term “cysteine disulfide bridge” refers to a functional group with the general structure R—S—S—R. The linkage is also called an SS-bond or a disulfide bridge and is derived by the coupling of two thiol groups of cysteine residues. It is particularly preferred for the antibody construct of the invention that the cysteines forming the cysteine disulfide bridge in the mature antibody construct are introduced into the amino acid sequence of the CH2 domain corresponding to 309 and 321 (Kabat numbering).

[0239] In one embodiment of the invention a glycosylation site in Kabat position 314 of the CH2 domain is removed. It is preferred that this removal of the glycosylation site is achieved by a N314X substitution, wherein X is any amino acid excluding Q. Said substitution is preferably a N314G. In a more preferred embodiment, said CH2 domain additionally comprises the following substitutions (position according to Kabat) V321C and R309C (these substitutions introduce the intra domain cysteine disulfide bridge at Kabat positions 309 and 321).

[0240] It is assumed that the preferred features of the antibody construct of the invention compared e.g. to the bispecific heteroFc antibody construct known in the art (FigureF 1b) may be inter alia related to the introduction of the above described modifications in the CH2 domain. Thus, it is preferred for the construct of the invention that the CH2 domains in the third domain of the antibody construct of the invention comprise the intra domain cysteine disulfide bridge at Kabat positions 309 and 321 and/or the glycosylation site at Kabat position 314 is removed, preferably by a N314G substitution.

[0241] In a further preferred embodiment of the invention the CH2 domains in the third domain of the antibody construct of the invention comprise the intra domain cysteine disulfide bridge at Kabat positions 309 and 321 and the glycosylation site at Kabat position 314 is removed by a N314G substitution. Most preferably, the polypeptide monomer of the third domain of the antibody construct of the invention has an amino acid sequence selected from the group consisting of SEQ ID NO: 17 and 18.

[0242] In one embodiment the invention provides an antibody construct, wherein:
[0243] (i) the first domain comprises two antibody variable domains and the second domain comprises two antibody variable domains;
[0244] (ii) the first domain comprises one antibody variable domain and the second domain comprises two antibody variable domains;
[0245] (iii) the first domain comprises two antibody variable domains and the second domain comprises one antibody variable domain; or
[0246] (iv) the first domain comprises one antibody variable domain and the second domain comprises one antibody variable domain.

[0247] Accordingly, the first and the second domain may be binding domains comprising each two antibody variable domains such as a VH and a VL domain. Examples for such binding domains comprising two antibody variable domains where described herein above and comprise e.g. Fv fragments, scFv fragments or Fab fragments described herein above. Alternatively either one or both of those binding domains may comprise only a single variable domain Examples for such single domain binding domains where described herein above and comprise e.g. nanobodies or single variable domain antibodies comprising merely one variable domain, which may be VHH, VH or VL, that specifically bind an antigen or epitope independently of other V regions or domains.

[0248] In a preferred embodiment of the antibody construct of the invention first and second domain are fused to the third domain via a peptide linker. Preferred peptide linker have been described herein above and are characterized by the amino acid sequence Gly-Gly-Gly-Gly-Ser, i.e. Gly₄Ser (SEQ ID NO: 1), or polymers thereof, i.e. (Gly₄Ser)x, where x is an integer of 1 or greater (e.g. 2 or 3). A particularly preferred linker for the fusion of the first and second domain to the third domain is depicted in SEQ ID NO: 1.

[0249] In a preferred embodiment the antibody construct of the invention is characterized to comprise in an amino to carboxyl order:
[0250] (a) the first domain;
[0251] (b) a peptide linker having an amino acid sequence selected from the group consisting of SEQ ID NO: 1-3;
[0252] (c) the second domain;
[0253] (d) a peptide linker having an amino acid sequence selected from the group consisting of SEQ ID NO: 1, 2, 3, 9, 10, 11 and 12;
[0254] (e) the first polypeptide monomer of the third domain;
[0255] (f) a peptide linker having an amino acid sequence selected from the group consisting of SEQ ID NO: 5, 6, 7 and 8; and
[0256] (g) the second polypeptide monomer of the third domain

[0257] The antibody construct of the present invention comprises a first domain which binds to MUC17, preferably to the extracellular domain (ECD) of MUC17. It is understood that the term “binding to the extracellular domain of MUC17”, in the context of the present invention, implies that the binding domain binds to MUC17 expressed on the surface of a target cell. The first domain according to the invention hence preferably binds to MUC17 when it is expressed by naturally expressing cells or cell lines, and/or by cells or cell lines transformed or (stably/transiently) transfected with MUC17. In a preferred embodiment the first binding domain also binds to MUC17 when MUC17 is used as a “target” or “ligand” molecule in an in vitro binding assay such as BIAcore or Scatchard. The “target cell” can be any prokaryotic or eukaryotic cell expressing MUC17 on its surface; preferably the target cell is a cell that is part of the human or animal body, such as a specific MUC17 expressing cancer or tumor cell.

[0258] Preferably, the first binding domain binds to human MUC17/MUC17 ECD. In a further preferred embodiment, it binds to macaque MUC17/MUC17 ECD. According to the most preferred embodiment, it binds to both the human and the macaque MUC17/MUC17 ECD. The “MUC17 extracellular domain” or “MUC17 ECD” refers to the MUC17 region or sequence which is essentially free of transmembrane and cytoplasmic domains of MUC17. It will be understood by the skilled artisan that the transmembrane domain identified for the MUC17 polypeptide of the present invention is identified pursuant to criteria routinely employed in the art for identifying that type of hydrophobic domain. The exact boundaries of a transmembrane domain may vary but most likely by no more than about 5 amino acids at either end of the domain specifically mentioned herein.

[0259] Preferred binding domains which bind to MUC17 are disclosed in WO 2010/037836, and WO 2011/121110. Any binding domain for MUC17 described in these applications may be used in the context of the present invention.

[0260] In one aspect of the invention the antibody construct comprises in an amino to carboxyl order:

(a) the first domain having an amino acid sequence selected from the group consisting of SEQ ID NOs: 50, 56, 68, 74, 86, 92, 104, 110, 122, 128, 140, 146, 158, 164, 176, 182, 194, 200, 212, 218, 230, 236, 248, 254, 266, 272, 284, 290, 302, 308, 320, 335, 350, 365, 380, 395, 410, 425, 440, 455, 470;
[0261] (b) a peptide linker having an amino acid sequence selected from the group consisting of SEQ ID NOs: 1-3;
[0262] (c) the second domain having an amino acid sequence selected from the group consisting of SEQ ID NOs: 23, 25, 41, 43, 59, 61, 77, 79, 95, 97, 113, 115, 131, 133, 149, 151, 167, 169, 185 or 187 of WO 2008/119567 (SEQ ID NOs: 586-605 herein) or as depicted in SEQ ID NO: 15;
[0263] (d) a peptide linker having an amino acid sequence selected from the group consisting of SEQ ID NOs: 1, 2, 3, 9, 10, 11 and 12;
[0264] (e) the first polypeptide monomer of the third domain having a polypeptide sequence selected from the group consisting of SEQ ID NOs: 17-24;
[0265] (f) a peptide linker having an amino acid sequence selected from the group consisting of SEQ ID NOs: 5, 6, 7 and 8; and
[0266] (g) the second polypeptide monomer of the third domain having a polypeptide sequence selected from the group consisting of SEQ ID NOs: 17-24.

[0267] In line with this preferred embodiment, the first and second domain which are fused via a peptide linker to a single chain polypeptide comprise a sequence selected from the group consisting of: SEQ ID NO: 51, 57, 69, 75, 87, 93, 105, 111, 123, 129, 141, 147, 159, 165, 177, 183, 195, 201, 213, 219, 231, 237, 249, 255, 267, 273, 285, 291, 303, 309, 321, 324, 336, 339, 351, 354, 366, 369, 381, 384, 396, 399, 411, 414, 426, 429, 441, 444, 456, 459, 471 and 474.

[0268] In one aspect the antibody construct of the invention is characterized by having an amino acid sequence selected from the group consisting of: SEQ ID NO: 52, 53, 58, 59, 70, 71, 76, 77, 88, 89, 94, 95, 106, 107, 112, 113, 124, 125, 130, 131, 142, 143, 148, 149, 160, 161, 166, 167, 178, 179, 184, 185, 196, 197, 202, 203, 214, 215, 220, 221, 232, 233, 238, 239, 250, 251, 256, 257, 268, 269, 274, 275, 286, 287, 292, 293, 304 305, 310, 311, 322, 323, 325, 326, 337, 338, 340, 341, 352, 353, 355, 356, 367, 368, 370, 371, 382, 383, 385, 386, 397, 398, 400, 401, 412, 413, 415, 416, 427, 428, 430, 431, 442, 443, 445, 446, 457, 458, 460, 461, 472, 473, 475 and 476.

[0269] The invention further provides a polynucleotide/nucleic acid molecule encoding an antibody construct of the invention. A polynucleotide is a biopolymer composed of 13 or more nucleotide monomers covalently bonded in a chain. DNA (such as cDNA) and RNA (such as mRNA) are examples of polynucleotides with distinct biological function. Nucleotides are organic molecules that serve as the monomers or subunits of nucleic acid molecules like DNA or RNA. The nucleic acid molecule or polynucleotide can be double stranded and single stranded, linear and circular. It is preferably comprised in a vector which is preferably comprised in a host cell. Said host cell is, e.g. after transformation or transfection with the vector or the polynucleotide of the invention, capable of expressing the antibody construct. For that purpose the polynucleotide or nucleic acid molecule is operatively linked with control sequences.

[0270] The genetic code is the set of rules by which information encoded within genetic material (nucleic acids) is translated into proteins. Biological decoding in living cells is accomplished by the ribosome which links amino acids in an order specified by mRNA, using tRNA molecules to carry amino acids and to read the mRNA three nucleotides at a time. The code defines how sequences of these nucleotide triplets, called codons, specify which amino acid will be added next during protein synthesis. With some exceptions, a three-nucleotide codon in a nucleic acid sequence specifies a single amino acid. Because the vast majority of genes are encoded with exactly the same code, this particular code is often referred to as the canonical or standard genetic code. While the genetic code determines the protein sequence for a given coding region, other genomic regions can influence when and where these proteins are produced.

[0271] Furthermore, the invention provides a vector comprising a polynucleotide/nucleic acid molecule of the invention. A vector is a nucleic acid molecule used as a vehicle to transfer (foreign) genetic material into a cell. The term “vector” encompasses—but is not restricted to—plasmids, viruses, cosmids and artificial chromosomes. In general, engineered vectors comprise an origin of replication, a multicloning site and a selectable marker. The vector itself is generally a nucleotide sequence, commonly a DNA sequence that comprises an insert (transgene) and a larger sequence that serves as the “backbone” of the vector. Modern vectors may encompass additional features besides the transgene insert and a backbone: promoter, genetic marker, antibiotic resistance, reporter gene, targeting sequence, protein purification tag. Vectors called expression vectors (expression constructs) specifically are for the expression of the transgene in the target cell, and generally have control sequences.

[0272] The term “control sequences” refers to DNA sequences necessary for the expression of an operably linked coding sequence in a particular host organism. The control sequences that are suitable for prokaryotes, for example, include a promoter, optionally an operator sequence, and a ribosome binding side. Eukaryotic cells are known to utilize promoters, polyadenylation signals, and enhancers.

[0273] A nucleic acid is “operably linked” when it is placed into a functional relationship with another nucleic acid sequence. For example, DNA for a presequence or secretory leader is operably linked to DNA for a polypeptide if it is expressed as a preprotein that participates in the secretion of the polypeptide; a promoter or enhancer is operably linked to a coding sequence if it affects the transcription of the sequence; or a ribosome binding side is operably linked to a coding sequence if it is positioned so as to facilitate translation. Generally, “operably linked” means that the DNA sequences being linked are contiguous, and, in the case of a secretory leader, contiguous and in reading phase. However, enhancers do not have to be contiguous. Linking is accomplished by ligation at convenient restriction sites. If such sites do not exist, the synthetic oligonucleotide adaptors or linkers are used in accordance with conventional practice.

[0274] “Transfection” is the process of deliberately introducing nucleic acid molecules or polynucleotides (including vectors) into target cells. The term is mostly used for non-viral methods in eukaryotic cells. Transduction is often used to describe virus-mediated transfer of nucleic acid molecules or polynucleotides. Transfection of animal cells typically involves opening transient pores or “holes” in the cell membrane, to allow the uptake of material. Transfection can be carried out using calcium phosphate, by electroporation, by cell squeezing or by mixing a cationic lipid with the material to produce liposomes, which fuse with the cell membrane and deposit their cargo inside.

[0275] The term “transformation” is used to describe non-viral transfer of nucleic acid molecules or polynucleotides (including vectors) into bacteria, and also into non-animal eukaryotic cells, including plant cells. Transformation is hence the genetic alteration of a bacterial or non-animal eukaryotic cell resulting from the direct uptake through the cell membrane(s) from its surroundings and subsequent incorporation of exogenous genetic material (nucleic acid molecules). Transformation can be effected by artificial means. For transformation to happen, cells or bacteria must be in a state of competence, which may occur as a time-limited response to environmental conditions such as starvation and cell density.

[0276] Moreover, the invention provides a host cell transformed or transfected with the polynucleotide/nucleic acid molecule or with the vector of the invention. As used herein, the terms “host cell” or “recipient cell” are intended to include any individual cell or cell culture that can be or has/have been recipients of vectors, exogenous nucleic acid molecules, and polynucleotides encoding the antibody construct of the present invention; and/or recipients of the antibody construct itself. The introduction of the respective material into the cell is carried out by way of transformation, transfection and the like. The term “host cell” is also intended to include progeny or potential progeny of a single cell. Because certain modifications may occur in succeeding generations due to either natural, accidental, or deliberate mutation or due to environmental influences, such progeny may not, in fact, be completely identical (in morphology or in genomic or total DNA complement) to the parent cell, but is still included within the scope of the term as used herein. Suitable host cells include prokaryotic or eukaryotic cells, and also include but are not limited to bacteria, yeast cells, fungi cells, plant cells, and animal cells such as insect cells and mammalian cells, e.g., murine, rat, macaque or human

[0277] The antibody construct of the invention can be produced in bacteria. After expression, the antibody construct of the invention is isolated from the E. coli cell paste in a soluble fraction and can be purified through, e.g., affinity chromatography and/or size exclusion. Final purification can be carried out similar to the process for purifying antibody expressed e.g., in CHO cells.

[0278] In addition to prokaryotes, eukaryotic microbes such as filamentous fungi or yeast are suitable cloning or expression hosts for the antibody construct of the invention. Saccharomyces cerevisiae, or common baker's yeast, is the most commonly used among lower eukaryotic host microorganisms. However, a number of other genera, species, and strains are commonly available and useful herein, such as Schizosaccharomyces pombe, Kluyveromyces hosts such as K. lactis, K. fragilis (ATCC 12424), K. bulgaricus (ATCC 16045), K. wickeramii (ATCC 24178), K. waltii (ATCC 56500), K. drosophilarum (ATCC 36906), K. thermotolerans, and K. marxianus; yarrowia (EP 402 226); Pichia pastoris (EP 183 070); Candida; Trichoderma reesia (EP 244 234); Neurospora crassa; Schwanniomyces such as Schwanniomyces occidentalis; and filamentous fungi such as Neurospora, Penicillium, Tolypocladium, and Aspergillus hosts such as A. nidulans and A. niger.

[0279] Suitable host cells for the expression of glycosylated antibody construct of the invention are derived from multicellular organisms. Examples of invertebrate cells include plant and insect cells. Numerous baculoviral strains and variants and corresponding permissive insect host cells from hosts such as Spodoptera frugiperda (caterpillar), Aedes aegypti (mosquito), Aedes albopictus (mosquito), Drosophila melanogaster (fruit fly), and Bombyx mori have been identified. A variety of viral strains for transfection are publicly available, e.g., the L-1 variant of Autographa californica NPV and the Bm-5 strain of Bombyx mori NPV, and such viruses may be used as the virus herein according to the present invention, particularly for transfection of Spodoptera frugiperda cells.

[0280] Plant cell cultures of cotton, corn, potato, soybean, petunia, tomato, Arabidopsis and tobacco can also be used as hosts. Cloning and expression vectors useful in the production of proteins in plant cell culture are known to those of skill in the art. See e.g. Hiatt et al., Nature (1989) 342: 76-78, Owen et al. (1992) Bio/Technology 10: 790-794, Artsaenko et al. (1995) The Plant J 8: 745-750, and Fecker et al. (1996) Plant Mol Biol 32: 979-986.

[0281] However, interest has been greatest in vertebrate cells, and propagation of vertebrate cells in culture (tissue culture) has become a routine procedure. Examples of useful mammalian host cell lines are monkey kidney CV1 line transformed by SV40 (COS-7, ATCC CRL 1651); human embryonic kidney line (293 or 293 cells subcloned for growth in suspension culture, Graham et al., J. Gen Virol. 36: 59 (1977)); baby hamster kidney cells (BHK, ATCC CCL 10); Chinese hamster ovary cells/-DHFR (CHO, Urlaub et al., Proc. Natl. Acad. Sci. USA 77: 4216 (1980)); mouse sertoli cells (TM4, Mather, Biol. Reprod. 23: 243-251 (1980)); monkey kidney cells (CVI ATCC CCL 70); African green monkey kidney cells (VERO-76, ATCC CRL1587); human cervical carcinoma cells (HELA, ATCC CCL 2); canine kidney cells (MDCK, ATCC CCL 34); buffalo rat liver cells (BRL 3A, ATCC CRL 1442); human lung cells (W138, ATCC CCL 75); human liver cells (Hep G2,1413 8065); mouse mammary tumor (MMT 060562, ATCC CCLS 1); TRI cells (Mather et al., Annals N. Y Acad. Sci. (1982) 383: 44-68); MRC 5 cells; FS4 cells; and a human hepatoma line (Hep G2).

[0282] In a further embodiment the invention provides a process for the production of an antibody construct of the invention, said process comprising culturing a host cell of the invention under conditions allowing the expression of the antibody construct of the invention and recovering the produced antibody construct from the culture.

[0283] As used herein, the term “culturing” refers to the in vitro maintenance, differentiation, growth, proliferation and/or propagation of cells under suitable conditions in a medium. The term “expression” includes any step involved in the production of an antibody construct of the invention including, but not limited to, transcription, post-transcriptional modification, translation, post-translational modification, and secretion.

[0284] When using recombinant techniques, the antibody construct can be produced intracellularly, in the periplasmic space, or directly secreted into the medium. If the antibody construct is produced intracellularly, as a first step, the particulate debris, either host cells or lysed fragments, are removed, for example, by centrifugation or ultrafiltration. Carter et al., Bio/Technology 10: 163-167 (1992) describe a procedure for isolating antibodies which are secreted to the periplasmic space of E. coli. Briefly, cell paste is thawed in the presence of sodium acetate (pH 3.5), EDTA, and phenylmethylsulfonylfluoride (PMSF) over about 30 min. Cell debris can be removed by centrifugation. Where the antibody is secreted into the medium, supernatants from such expression systems are generally first concentrated using a commercially available protein concentration filter, for example, an Amicon or Millipore Pellicon ultrafiltration unit. A protease inhibitor such as PMSF may be included in any of the foregoing steps to inhibit proteolysis and antibiotics may be included to prevent the growth of adventitious contaminants.

[0285] The antibody construct of the invention prepared from the host cells can be recovered or purified using, for example, hydroxylapatite chromatography, gel electrophoresis, dialysis, and affinity chromatography. Other techniques for protein purification such as fractionation on an ion-exchange column, ethanol precipitation, Reverse Phase HPLC, chromatography on silica, chromatography on heparin SEPHAROSE™, chromatography on an anion or cation exchange resin (such as a polyaspartic acid column), chromato-focusing, SDS-PAGE, and ammonium sulfate precipitation are also available depending on the antibody to be recovered. Where the antibody construct of the invention comprises a CH3 domain, the Bakerbond ABX resin (J. T. Baker, Phillipsburg, N.J.) is useful for purification.

[0286] Affinity chromatography is a preferred purification technique. The matrix to which the affinity ligand is attached is most often agarose, but other matrices are available. Mechanically stable matrices such as controlled pore glass or poly (styrenedivinyl) benzene allow for faster flow rates and shorter processing times than can be achieved with agarose.

[0287] Moreover, the invention provides a pharmaceutical composition comprising an antibody construct of the invention or an antibody construct produced according to the process of the invention. It is preferred for the pharmaceutical composition of the invention that the homogeneity of the antibody construct is ≥80%, more preferably ≥81%, ≥82%, ≥83%, ≥84%, or ≥85%, further preferably ≥86%, ≥87%, ≥88%, ≥89%, or ≥90%, still further preferably, ≥91%, ≥92%, ≥93%, ≥94%, or ≥95% and most preferably ≥96%, ≥97%, ≥98% or ≥99%.

[0288] As used herein, the term “pharmaceutical composition” relates to a composition which is suitable for administration to a patient, preferably a human patient. The particularly preferred pharmaceutical composition of this invention comprises one or a plurality of the antibody construct(s) of the invention, preferably in a therapeutically effective amount. Preferably, the pharmaceutical composition further comprises suitable formulations of one or more (pharmaceutically effective) carriers, stabilizers, excipients, diluents, solubilizers, surfactants, emulsifiers, preservatives and/or adjuvants. Acceptable constituents of the composition are preferably nontoxic to recipients at the dosages and concentrations employed. Pharmaceutical compositions of the invention include, but are not limited to, liquid, frozen, and lyophilized compositions.

[0289] The inventive compositions may comprise a pharmaceutically acceptable carrier. In general, as used herein, “pharmaceutically acceptable carrier” means any and all aqueous and non-aqueous solutions, sterile solutions, solvents, buffers, e.g. phosphate buffered saline (PBS) solutions, water, suspensions, emulsions, such as oil/water emulsions, various types of wetting agents, liposomes, dispersion media and coatings, which are compatible with pharmaceutical administration, in particular with parenteral administration. The use of such media and agents in pharmaceutical compositions is well known in the art, and the compositions comprising such carriers can be formulated by well-known conventional methods.

[0290] Certain embodiments provide pharmaceutical compositions comprising the antibody construct of the invention and further one or more excipients such as those illustratively described in this section and elsewhere herein. Excipients can be used in the invention in this regard for a wide variety of purposes, such as adjusting physical, chemical, or biological properties of formulations, such as adjustment of viscosity, and or processes of the invention to improve effectiveness and or to stabilize such formulations and processes against degradation and spoilage due to, for instance, stresses that occur during manufacturing, shipping, storage, pre-use preparation, administration, and thereafter.

[0291] In certain embodiments, the pharmaceutical composition may contain formulation materials for the purpose of modifying, maintaining or preserving, e.g., the pH, osmolarity, viscosity, clarity, color, isotonicity, odor, sterility, stability, rate of dissolution or release, adsorption or penetration of the composition (see, REMINGTON'S PHARMACEUTICAL SCIENCES, 18″ Edition, (A. R. Genrmo, ed.), 1990, Mack Publishing Company). In such embodiments, suitable formulation materials may include, but are not limited to:
[0292] amino acids such as glycine, alanine, glutamine, asparagine, threonine, proline, 2-phenylalanine, including charged amino acids, preferably lysine, lysine acetate, arginine, glutamate and/or histidine
[0293] antimicrobials such as antibacterial and antifungal agents
[0294] antioxidants such as ascorbic acid, methionine, sodium sulfite or sodium hydrogen-sulfite;
[0295] buffers, buffer systems and buffering agents which are used to maintain the composition at physiological pH or at a slightly lower pH, preferably a lower pH of 4.0 to 6.5; examples of buffers are borate, bicarbonate, Tris-HCl, citrates, phosphates or other organic acids, succinate, phosphate, and histidine; for example Tris buffer of about pH 7.0-8.5;
[0296] non-aqueous solvents such as propylene glycol, polyethylene glycol, vegetable oils such as olive oil, and injectable organic esters such as ethyl oleate;
[0297] aqueous carriers including water, alcoholic/aqueous solutions, emulsions or suspensions, including saline and buffered media;
[0298] biodegradable polymers such as polyesters;
[0299] bulking agents such as mannitol or glycine;
[0300] chelating agents such as ethylenediamine tetraacetic acid (EDTA);
[0301] isotonic and absorption delaying agents;
[0302] complexing agents such as caffeine, polyvinylpyrrolidone, beta-cyclodextrin or hydroxypropyl-beta-cyclodextrin)
[0303] fillers;
[0304] monosaccharides; disaccharides; and other carbohydrates (such as glucose, mannose or dextrins); carbohydrates may be non-reducing sugars, preferably trehalose, sucrose, octasulfate, sorbitol or xylitol;
[0305] (low molecular weight) proteins, polypeptides or proteinaceous carriers such as human or bovine serum albumin, gelatin or immunoglobulins, preferably of human origin;
[0306] coloring and flavouring agents;
[0307] sulfur containing reducing agents, such as glutathione, thioctic acid, sodium thioglycolate, thioglycerol, [alpha]-monothioglycerol, and sodium thio sulfate
[0308] diluting agents;
[0309] emulsifying agents;
[0310] hydrophilic polymers such as polyvinylpyrrolidone)
[0311] salt-forming counter-ions such as sodium;
[0312] preservatives such as antimicrobials, anti-oxidants, chelating agents, inert gases and the like; examples are: benzalkonium chloride, benzoic acid, salicylic acid, thimerosal, phenethyl alcohol, methylparaben, propylparaben, chlorhexidine, sorbic acid or hydrogen peroxide);
[0313] metal complexes such as Zn-protein complexes;
[0314] solvents and co-solvents (such as glycerin, propylene glycol or polyethylene glycol);
[0315] sugars and sugar alcohols, such as trehalose, sucrose, octasulfate, mannitol, sorbitol or xylitol stachyose, mannose, sorbose, xylose, ribose, myoinisitose, galactose, lactitol, ribitol, myoinisitol, galactitol, glycerol, cyclitols (e.g., inositol), polyethylene glycol; and polyhydric sugar alcohols;
[0316] suspending agents;
[0317] surfactants or wetting agents such as pluronics, PEG, sorbitan esters, polysorbates such as polysorbate 20, polysorbate, triton, tromethamine, lecithin, cholesterol, tyloxapal; surfactants may be detergents, preferably with a molecular weight of >1.2 KD and/or a polyether, preferably with a molecular weight of >3 KD; non-limiting examples for preferred detergents are Tween 20, Tween 40, Tween 60, Tween 80 and Tween 85; non-limiting examples for preferred polyethers are PEG 3000, PEG 3350, PEG 4000 and PEG 5000;
[0318] stability enhancing agents such as sucrose or sorbitol;
[0319] tonicity enhancing agents such as alkali metal halides, preferably sodium or potassium chloride, mannitol sorbitol;
[0320] parenteral delivery vehicles including sodium chloride solution, Ringer's dextrose, dextrose and sodium chloride, lactated Ringer's, or fixed oils;
[0321] intravenous delivery vehicles including fluid and nutrient replenishers, electrolyte replenishers (such as those based on Ringer's dextrose).

[0322] In the context of the present invention, a pharmaceutical composition, which is preferably a liquid composition or may be a solid composition obtained by lyophilisation or may be a reconstituted liquid composition comprises

(a) an antibody construct comprising at least three domains, wherein:
[0323] a first domain binds to a target cell surface antigen and has an isoelectric point (pI) in the range of 4 to 9.5;
[0324] a second domain binds to a second antigen; and has a pI in the range of 8 to 10, preferably 8.5 to 9.0; and
[0325] optionally a third domain comprises two polypeptide monomers, each comprising a hinge, a CH2 domain and a CH3 domain, wherein said two polypeptide monomers are fused to each other via a peptide linker;
   (b) at least one buffer agent;
   (c) at least one saccharide; and
   (d) at least one surfactant;
   and wherein the pH of the pharmaceutical composition is in the range of 3.5 to 6.

[0326] It is further envisaged in the context of the present invention that the at least one buffer agent is present at a concentration range of 5 to 200 mM, more preferably at a concentration range of 10 to 50 mM. It is envisaged in the context of the present invention that the at least one saccharide is selected from the group consisting of monosaccharide, disaccharide, cyclic polysaccharide, sugar alcohol, linear branched dextran or linear non-branched dextran. It is also envisaged in the context of the present invention that the disaccharide is selected from the group consisting of sucrose, trehalose and mannitol, sorbitol, and combinations thereof. It is further envisaged in the context of the present invention that the sugar alcohol is sorbitol. It is envisaged in the context of the present invention that the at least one saccharide is present at a concentration in the range of 1 to 15% (m/V), preferably in a concentration range of 9 to 12% (m/V).

[0327] It is also envisaged in the context of the present invention that the at least one surfactant is selected from the group consisting of polysorbate 20, polysorbate 40, polysorbate 60, polysorbate 80, poloxamer 188, pluronic F68, triton X-100, polyoxyethylen, PEG 3350, PEG 4000 and combinations thereof. It is further envisaged in the context of the present invention that the at least one surfactant is present at a concentration in the range of 0.004 to 0.5% (m/V), preferably in the range of 0.001 to 0.01% (m/V). It is envisaged in the context of the present invention that the pH of the composition is in the range of 4.0 to 5.0, preferably 4.2. It is also envisaged in the context of the present invention that the pharmaceutical composition has an osmolarity in the range of 150 to 500 mOsm. It is further envisaged in the context of the present invention that the pharmaceutical composition further comprises an excipient selected from the group consisting of, one or more polyol and one or more amino acid. It is envisaged in the context of the present invention that said one or more excipient is present in the concentration range of 0.1 to 15 (w/V).

[0328] It is also envisaged in the context of the present invention that the pharmaceutical composition comprises
[0329] (a) the antibody construct as discussed above,
[0330] (b) 10 mM glutamate or acetate,
[0331] (c) 9% (m/V) sucrose or 6% (m/V) sucrose and 6% (m/V) hydroxypropyl-β-cyclodextrin,
[0332] (d) 0.01% (m/V) polysorbate 80 and wherein the pH of the liquid pharmaceutical composition is 4.2.

[0333] It is further envisaged in the context of the present invention that the antibody construct is present in a concentration range of 0.1 to 8 mg/ml, preferably of 0.2-2.5 mg/ml, more preferably of 0.25-1.0 mg/ml.

[0334] It is evident to those skilled in the art that the different constituents of the pharmaceutical composition (e.g., those listed above) can have different effects, for example, and amino acid can act as a buffer, a stabilizer and/or an antioxidant; mannitol can act as a bulking agent and/or a tonicity enhancing agent; sodium chloride can act as delivery vehicle and/or tonicity enhancing agent; etc.

[0335] It is envisaged that the composition of the invention may comprise, in addition to the polypeptide of the invention defined herein, further biologically active agents, depending on the intended use of the composition. Such agents may be drugs acting on the gastro-intestinal system, drugs acting as cytostatica, drugs preventing hyperurikemia, drugs inhibiting immunoreactions (e.g. corticosteroids), drugs modulating the inflammatory response, drugs acting on the circulatory system and/or agents such as cytokines known in the art. It is also envisaged that the antibody construct of the present invention is applied in a co-therapy, i.e., in combination with another anti-cancer medicament.

[0336] In certain embodiments, the optimal pharmaceutical composition will be determined by one skilled in the art depending upon, for example, the intended route of administration, delivery format and desired dosage. See, for example, REMINGTON'S PHARMACEUTICAL SCIENCES, supra. In certain embodiments, such compositions may influence the physical state, stability, rate of in vivo release and rate of in vivo clearance of the antibody construct of the invention. In certain embodiments, the primary vehicle or carrier in a pharmaceutical composition may be either aqueous or non-aqueous in nature. For example, a suitable vehicle or carrier may be water for injection, physiological saline solution or artificial cerebrospinal fluid, possibly supplemented with other materials common in compositions for parenteral administration. Neutral buffered saline or saline mixed with serum albumin are further exemplary vehicles. In certain embodiments, the antibody construct of the invention compositions may be prepared for storage by mixing the selected composition having the desired degree of purity with optional formulation agents (REMINGTON'S PHARMACEUTICAL SCIENCES, supra) in the form of a lyophilized cake or an aqueous solution. Further, in certain embodiments, the antibody construct of the invention may be formulated as a lyophilizate using appropriate excipients such as sucrose.

[0337] When parenteral administration is contemplated, the therapeutic compositions for use in this invention may be provided in the form of a pyrogen-free, parenterally acceptable aqueous solution comprising the desired antibody construct of the invention in a pharmaceutically acceptable vehicle. A particularly suitable vehicle for parenteral injection is sterile distilled water in which the antibody construct of the invention is formulated as a sterile, isotonic solution, properly preserved. In certain embodiments, the preparation can involve the formulation of the desired molecule with an agent, such as injectable microspheres, bio-erodible particles, polymeric compounds (such as polylactic acid or polyglycolic acid), beads or liposomes, that may provide controlled or sustained release of the product which can be delivered via depot injection. In certain embodiments, hyaluronic acid may also be used, having the effect of promoting sustained duration in the circulation. In certain embodiments, implantable drug delivery devices may be used to introduce the desired antibody construct.

[0338] Additional pharmaceutical compositions will be evident to those skilled in the art, including formulations involving the antibody construct of the invention in sustained- or controlled-delivery/release formulations. Techniques for formulating a variety of other sustained- or controlled-delivery means, such as liposome carriers, bio-erodible microparticles or porous beads and depot injections, are also known to those skilled in the art. See, for example, International Patent Application No. PCT/US93/00829, which describes controlled release of porous polymeric microparticles for delivery of pharmaceutical compositions. Sustained-release preparations may include semipermeable polymer matrices in the form of shaped articles, e.g., films, or microcapsules. Sustained release matrices may include polyesters, hydrogels, polylactides (as disclosed in U.S. Pat. No. 3,773,919 and European Patent Application Publication No. EP 058481), copolymers of L-glutamic acid and gamma ethyl-L-glutamate (Sidman et al., 1983, Biopolymers 2:547-556), poly (2-hydroxyethyl-methacrylate) (Langer et al., 1981, J. Biomed. Mater. Res. 15:167-277 and Langer, 1982, Chem. Tech. 12:98-105), ethylene vinyl acetate (Langer et al., 1981, supra) or poly-D(−)-3-hydroxybutyric acid (European Patent Application Publication No. EP 133,988). Sustained release compositions may also include liposomes that can be prepared by any of several methods known in the art. See, e.g., Eppstein et al., 1985, Proc. Natl. Acad. Sci. U.S.A. 82:3688-3692; European Patent Application Publication Nos. EP 036,676; EP 088,046 and EP 143,949.

[0339] The antibody construct may also be entrapped in microcapsules prepared, for example, by coacervation techniques or by interfacial polymerization (for example, hydroxymethylcellulose or gelatine-microcapsules and poly (methylmethacylate) microcapsules, respectively), in colloidal drug delivery systems (for example, liposomes, albumin microspheres, microemulsions, nanoparticles and nanocapsules), or in macroemulsions. Such techniques are disclosed in Remington's Pharmaceutical Sciences, 16th edition, Oslo, A., Ed., (1980).

[0340] Pharmaceutical compositions used for in vivo administration are typically provided as sterile preparations. Sterilization can be accomplished by filtration through sterile filtration membranes. When the composition is lyophilized, sterilization using this method may be conducted either prior to or following lyophilization and reconstitution. Compositions for parenteral administration can be stored in lyophilized form or in a solution. Parenteral compositions generally are placed into a container having a sterile access port, for example, an intravenous solution bag or vial having a stopper pierceable by a hypodermic injection needle.

[0341] Another aspect of the invention includes self-buffering antibody construct of the invention formulations, which can be used as pharmaceutical compositions, as described in international patent application WO 06138181A2 (PCT/US2006/022599). A variety of expositions are available on protein stabilization and formulation materials and methods useful in this regard, such as Arakawa et al., “Solvent interactions in pharmaceutical formulations,” Pharm Res. 8(3): 285-91 (1991); Kendrick et al., “Physical stabilization of proteins in aqueous solution” in: RATIONAL DESIGN OF STABLE PROTEIN FORMULATIONS: THEORY AND PRACTICE, Carpenter and Manning, eds. Pharmaceutical Biotechnology. 13: 61-84 (2002), and Randolph et al., “Surfactant-protein interactions”, Pharm Biotechnol. 13: 159-75 (2002), see particularly the parts pertinent to excipients and processes of the same for self-buffering protein formulations in accordance with the current invention, especially as to protein pharmaceutical products and processes for veterinary and/or human medical uses.

[0342] Salts may be used in accordance with certain embodiments of the invention to, for example, adjust the ionic strength and/or the isotonicity of a formulation and/or to improve the solubility and/or physical stability of a protein or other ingredient of a composition in accordance with the invention. As is well known, ions can stabilize the native state of proteins by binding to charged residues on the protein's surface and by shielding charged and polar groups in the protein and reducing the strength of their electrostatic interactions, attractive, and repulsive interactions. Ions also can stabilize the denatured state of a protein by binding to, in particular, the denatured peptide linkages (—CONH) of the protein. Furthermore, ionic interaction with charged and polar groups in a protein also can reduce intermolecular electrostatic interactions and, thereby, prevent or reduce protein aggregation and insolubility.

[0343] Ionic species differ significantly in their effects on proteins. A number of categorical rankings of ions and their effects on proteins have been developed that can be used in formulating pharmaceutical compositions in accordance with the invention. One example is the Hofmeister series, which ranks ionic and polar non-ionic solutes by their effect on the conformational stability of proteins in solution. Stabilizing solutes are referred to as “kosmotropic”. Destabilizing solutes are referred to as “chaotropic”. Kosmotropes commonly are used at high concentrations (e.g., >1 molar ammonium sulfate) to precipitate proteins from solution (“salting-out”). Chaotropes commonly are used to denture and/or to solubilize proteins (“salting-in”). The relative effectiveness of ions to “salt-in” and “salt-out” defines their position in the Hofmeister series.

[0344] Free amino acids can be used in the antibody construct of the invention formulations in accordance with various embodiments of the invention as bulking agents, stabilizers, and antioxidants, as well as other standard uses. Lysine, proline, serine, and alanine can be used for stabilizing proteins in a formulation. Glycine is useful in lyophilization to ensure correct cake structure and properties. Arginine may be useful to inhibit protein aggregation, in both liquid and lyophilized formulations. Methionine is useful as an antioxidant.

[0345] Polyols include sugars, e.g., mannitol, sucrose, and sorbitol and polyhydric alcohols such as, for instance, glycerol and propylene glycol, and, for purposes of discussion herein, polyethylene glycol (PEG) and related substances. Polyols are kosmotropic. They are useful stabilizing agents in both liquid and lyophilized formulations to protect proteins from physical and chemical degradation processes. Polyols also are useful for adjusting the tonicity of formulations. Among polyols useful in select embodiments of the invention is mannitol, commonly used to ensure structural stability of the cake in lyophilized formulations. It ensures structural stability to the cake. It is generally used with a lyoprotectant, e.g., sucrose. Sorbitol and sucrose are among preferred agents for adjusting tonicity and as stabilizers to protect against freeze-thaw stresses during transport or the preparation of bulks during the manufacturing process. Reducing sugars (which contain free aldehyde or ketone groups), such as glucose and lactose, can glycate surface lysine and arginine residues. Therefore, they generally are not among preferred polyols for use in accordance with the invention. In addition, sugars that form such reactive species, such as sucrose, which is hydrolyzed to fructose and glucose under acidic conditions, and consequently engenders glycation, also is not among preferred polyols of the invention in this regard. PEG is useful to stabilize proteins and as a cryoprotectant and can be used in the invention in this regard.

[0346] Embodiments of the antibody construct of the invention formulations further comprise surfactants. Protein molecules may be susceptible to adsorption on surfaces and to denaturation and consequent aggregation at air-liquid, solid-liquid, and liquid-liquid interfaces. These effects generally scale inversely with protein concentration. These deleterious interactions generally scale inversely with protein concentration and typically are exacerbated by physical agitation, such as that generated during the shipping and handling of a product. Surfactants routinely are used to prevent, minimize, or reduce surface adsorption. Useful surfactants in the invention in this regard include polysorbate 20, polysorbate 80, other fatty acid esters of sorbitan polyethoxylates, and poloxamer 188. Surfactants also are commonly used to control protein conformational stability. The use of surfactants in this regard is protein-specific since, any given surfactant typically will stabilize some proteins and destabilize others.

[0347] Polysorbates are susceptible to oxidative degradation and often, as supplied, contain sufficient quantities of peroxides to cause oxidation of protein residue side-chains, especially methionine. Consequently, polysorbates should be used carefully, and when used, should be employed at their lowest effective concentration. In this regard, polysorbates exemplify the general rule that excipients should be used in their lowest effective concentrations.

[0348] Embodiments of the antibody construct of the invention formulations further comprise one or more antioxidants. To some extent deleterious oxidation of proteins can be prevented in pharmaceutical formulations by maintaining proper levels of ambient oxygen and temperature and by avoiding exposure to light. Antioxidant excipients can be used as well to prevent oxidative degradation of proteins. Among useful antioxidants in this regard are reducing agents, oxygen/free-radical scavengers, and chelating agents. Antioxidants for use in therapeutic protein formulations in accordance with the invention preferably are water-soluble and maintain their activity throughout the shelf life of a product. EDTA is a preferred antioxidant in accordance with the invention in this regard. Antioxidants can damage proteins. For instance, reducing agents, such as glutathione in particular, can disrupt intramolecular disulfide linkages. Thus, antioxidants for use in the invention are selected to, among other things, eliminate or sufficiently reduce the possibility of themselves damaging proteins in the formulation.

[0349] Formulations in accordance with the invention may include metal ions that are protein co-factors and that are necessary to form protein coordination complexes, such as zinc necessary to form certain insulin suspensions. Metal ions also can inhibit some processes that degrade proteins. However, metal ions also catalyze physical and chemical processes that degrade proteins. Magnesium ions (10-120 mM) can be used to inhibit isomerization of aspartic acid to isoaspartic acid. Ca⁺² ions (up to 100 mM) can increase the stability of human deoxyribonuclease. Mg⁺², Mn⁺², and Zn⁺², however, can destabilize rhDNase. Similarly, Ca⁺² and Sr⁺² can stabilize Factor VIII, it can be destabilized by Mg⁺², Mn⁺² and Zn⁺², Cu⁺² and Fe⁺², and its aggregation can be increased by Al⁺³ ions.

[0350] Embodiments of the antibody construct of the invention formulations further comprise one or more preservatives. Preservatives are necessary when developing multi-dose parenteral formulations that involve more than one extraction from the same container. Their primary function is to inhibit microbial growth and ensure product sterility throughout the shelf-life or term of use of the drug product. Commonly used preservatives include benzyl alcohol, phenol and m-cresol. Although preservatives have a long history of use with small-molecule parenterals, the development of protein formulations that includes preservatives can be challenging. Preservatives almost always have a destabilizing effect (aggregation) on proteins, and this has become a major factor in limiting their use in multi-dose protein formulations. To date, most protein drugs have been formulated for single-use only. However, when multi-dose formulations are possible, they have the added advantage of enabling patient convenience, and increased marketability. A good example is that of human growth hormone (hGH) where the development of preserved formulations has led to commercialization of more convenient, multi-use injection pen presentations. At least four such pen devices containing preserved formulations of hGH are currently available on the market. Norditropin (liquid, Novo Nordisk), Nutropin AQ (liquid, Genentech) & Genotropin (lyophilized—dual chamber cartridge, Pharmacia & Upjohn) contain phenol while Somatrope (Eli Lilly) is formulated with m-cresol. Several aspects need to be considered during the formulation and development of preserved dosage forms. The effective preservative concentration in the drug product must be optimized. This requires testing a given preservative in the dosage form with concentration ranges that confer anti-microbial effectiveness without compromising protein stability.

[0351] As may be expected, development of liquid formulations containing preservatives are more challenging than lyophilized formulations. Freeze-dried products can be lyophilized without the preservative and reconstituted with a preservative containing diluent at the time of use. This shortens the time for which a preservative is in contact with the protein, significantly minimizing the associated stability risks. With liquid formulations, preservative effectiveness and stability should be maintained over the entire product shelf-life (about 18 to 24 months). An important point to note is that preservative effectiveness should be demonstrated in the final formulation containing the active drug and all excipient components.

[0352] The antibody constructs disclosed herein may also be formulated as immuno-liposomes. A “liposome” is a small vesicle composed of various types of lipids, phospholipids and/or surfactant which is useful for delivery of a drug to a mammal. The components of the liposome are commonly arranged in a bilayer formation, similar to the lipid arrangement of biological membranes. Liposomes containing the antibody construct are prepared by methods known in the art, such as described in Epstein et al., Proc. Natl. Acad. Sci. USA, 82: 3688 (1985); Hwang et al., Proc. Natl Acad. Sci. USA, 77: 4030 (1980); U.S. Pat. Nos. 4,485,045 and 4,544,545; and WO 97/38731. Liposomes with enhanced circulation time are disclosed in U.S. Pat. No. 5,013,556. Particularly useful liposomes can be generated by the reverse phase evaporation method with a lipid composition comprising phosphatidylcholine, cholesterol and PEG-derivatized phosphatidylethanolamine (PEG-PE). Liposomes are extruded through filters of defined pore size to yield liposomes with the desired diameter. Fab′ fragments of the antibody construct of the present invention can be conjugated to the liposomes as described in Martin et al. J. Biol. Chem. 257: 286-288 (1982) via a disulfide interchange reaction. A chemotherapeutic agent is optionally contained within the liposome. See Gabizon et al. J. National Cancer Inst. 81 (19) 1484 (1989).

[0353] Once the pharmaceutical composition has been formulated, it may be stored in sterile vials as a solution, suspension, gel, emulsion, solid, crystal, or as a dehydrated or lyophilized powder. Such formulations may be stored either in a ready-to-use form or in a form (e.g., lyophilized) that is reconstituted prior to administration.

[0354] The biological activity of the pharmaceutical composition defined herein can be determined for instance by cytotoxicity assays, as described in the following examples, in WO 99/54440 or by Schlereth et al. (Cancer Immunol. Immunother. 20 (2005), 1-12). “Efficacy” or “in vivo efficacy” as used herein refers to the response to therapy by the pharmaceutical composition of the invention, using e.g. standardized NCI response criteria. The success or in vivo efficacy of the therapy using a pharmaceutical composition of the invention refers to the effectiveness of the composition for its intended purpose, i.e. the ability of the composition to cause its desired effect, i.e. depletion of pathologic cells, e.g. tumor cells. The in vivo efficacy may be monitored by established standard methods for the respective disease entities including, but not limited to white blood cell counts, differentials, Fluorescence Activated Cell Sorting, bone marrow aspiration. In addition, various disease specific clinical chemistry parameters and other established standard methods may be used. Furthermore, computer-aided tomography, X-ray, nuclear magnetic resonance tomography (e.g. for National Cancer Institute-criteria based response assessment [Cheson B D, Horning S J, Coiffier B, Shipp M A, Fisher R I, Connors J M, Lister T A, Vose J, Grillo-Lopez A, Hagenbeek A, Cabanillas F, Klippensten D, Hiddemann W, Castellino R, Harris N L, Armitage J O, Carter W, Hoppe R, Canellos G P. Report of an international workshop to standardize response criteria for non-Hodgkin's lymphomas. NCI Sponsored International Working Group. J Clin Oncol. 1999 April; 17(4):1244]), positron-emission tomography scanning, white blood cell counts, differentials, Fluorescence Activated Cell Sorting, bone marrow aspiration, lymph node biopsies/histologies, and various lymphoma specific clinical chemistry parameters (e.g. lactate dehydrogenase) and other established standard methods may be used.

[0355] Another major challenge in the development of drugs such as the pharmaceutical composition of the invention is the predictable modulation of pharmacokinetic properties. To this end, a pharmacokinetic profile of the drug candidate, i.e. a profile of the pharmacokinetic parameters that affect the ability of a particular drug to treat a given condition, can be established. Pharmacokinetic parameters of the drug influencing the ability of a drug for treating a certain disease entity include, but are not limited to: half-life, volume of distribution, hepatic first-pass metabolism and the degree of blood serum binding. The efficacy of a given drug agent can be influenced by each of the parameters mentioned above. It is an envisaged characteristic of the antibody constructs of the present invention provided with the specific FC modality that they comprise, for example, differences in pharmacokinetic behavior. A half-life extended targeting antibody construct according to the present invention preferably shows a surprisingly increased residence time in vivo in comparison to “canonical” non-HLE versions of said antibody construct.

[0356] “Half-life” means the time where 50% of an administered drug are eliminated through biological processes, e.g. metabolism, excretion, etc. By “hepatic first-pass metabolism” is meant the propensity of a drug to be metabolized upon first contact with the liver, i.e. during its first pass through the liver. “Volume of distribution” means the degree of retention of a drug throughout the various compartments of the body, like e.g. intracellular and extracellular spaces, tissues and organs, etc. and the distribution of the drug within these compartments. “Degree of blood serum binding” means the propensity of a drug to interact with and bind to blood serum proteins, such as albumin, leading to a reduction or loss of biological activity of the drug.

[0357] Pharmacokinetic parameters also include bioavailability, lag time (Tlag), Tmax, absorption rates, more onset and/or Cmax for a given amount of drug administered. “Bioavailability” means the amount of a drug in the blood compartment. “Lag time” means the time delay between the administration of the drug and its detection and measurability in blood or plasma. “Tmax” is the time after which maximal blood concentration of the drug is reached, and “Cmax” is the blood concentration maximally obtained with a given drug. The time to reach a blood or tissue concentration of the drug which is required for its biological effect is influenced by all parameters. Pharmacokinetic parameters of bispecific antibody constructs exhibiting cross-species specificity, which may be determined in preclinical animal testing in non-chimpanzee primates as outlined above, are also set forth e.g. in the publication by Schlereth et al. (Cancer Immunol. Immunother. 20 (2005), 1-12).

[0358] In a preferred aspect of the invention the pharmaceutical composition is stable for at least four weeks at about −20° C. As apparent from the appended examples the quality of an antibody construct of the invention vs. the quality of corresponding state of the art antibody constructs may be tested using different systems. Those tests are understood to be in line with the “ICH Harmonised Tripartite Guideline: Stability Testing of Biotechnological/Biological Products Q5C and Specifications: Test procedures and Acceptance Criteria for Biotech Biotechnological/Biological Products Q6B” and, thus are elected to provide a stability-indicating profile that provides certainty that changes in the identity, purity and potency of the product are detected. It is well accepted that the term purity is a relative term. Due to the effect of glycosylation, deamidation, or other heterogeneities, the absolute purity of a biotechnological/biological product should be typically assessed by more than one method and the purity value derived is method-dependent. For the purpose of stability testing, tests for purity should focus on methods for determination of degradation products.

[0359] For the assessment of the quality of a pharmaceutical composition comprising an antibody construct of the invention may be analyzed e.g. by analyzing the content of soluble aggregates in a solution (HMWS per size exclusion). It is preferred that stability for at least four weeks at about −20° C. is characterized by a content of less than 1.5% HMWS, preferably by less than 1% HMWS.

[0360] A preferred formulation for the antibody construct as a pharmaceutical composition may e.g. comprise the components of a formulation as described below:
[0361] Formulation:
[0362] potassium phosphate, L-arginine hydrochloride, trehalose dihydrate, polysorbate 80 at pH 6.0

[0363] Other examples for the assessment of the stability of an antibody construct of the invention in form of a pharmaceutical composition are provided in the appended examples 4-12. In those examples embodiments of antibody constructs of the invention are tested with respect to different stress conditions in different pharmaceutical formulations and the results compared with other half-life extending (HLE) formats of bispecific T cell engaging antibody construct known from the art. In general, it is envisaged that antibody constructs provided with the specific FC modality according to the present invention are typically more stable over a broad range of stress conditions such as temperature and light stress, both compared to antibody constructs provided with different HLE formats and without any HLE format (e.g. “canonical” antibody constructs). Said temperature stability may relate both to decreased (below room temperature including freezing) and increased (above room temperature including temperatures up to or above body temperature) temperature. As the person skilled in the art will acknowledge, such improved stability with regard to stress, which is hardly avoidable in clinical practice, makes the antibody construct safer because less degradation products will occur in clinical practice. In consequence, said increased stability means increased safety.

[0364] One embodiment provides the antibody construct of the invention or the antibody construct produced according to the process of the invention for use in the prevention, treatment or amelioration of a cancer correlating with MUC17 expression or MUC17 overexpression, such as prostate cancer.

[0365] The formulations described herein are useful as pharmaceutical compositions in the treatment, amelioration and/or prevention of the pathological medical condition as described herein in a patient in need thereof. The term “treatment” refers to both therapeutic treatment and prophylactic or preventative measures. Treatment includes the application or administration of the formulation to the body, an isolated tissue, or cell from a patient who has a disease/disorder, a symptom of a disease/disorder, or a predisposition toward a disease/disorder, with the purpose to cure, heal, alleviate, relieve, alter, remedy, ameliorate, improve, or affect the disease, the symptom of the disease, or the predisposition toward the disease.

[0366] The term “amelioration” as used herein refers to any improvement of the disease state of a patient having a disease as specified herein below, by the administration of an antibody construct according to the invention to a subject in need thereof. Such an improvement may also be seen as a slowing or stopping of the progression of the patient's disease. The term “prevention” as used herein means the avoidance of the occurrence or re-occurrence of a patient having a tumor or cancer or a metastatic cancer as specified herein below, by the administration of an antibody construct according to the invention to a subject in need thereof.

[0367] The term “disease” refers to any condition that would benefit from treatment with the antibody construct or the pharmaceutic composition described herein. This includes chronic and acute disorders or diseases including those pathological conditions that predispose the mammal to the disease in question.

[0368] A “neoplasm” is an abnormal growth of tissue, usually but not always forming a mass. When also forming a mass, it is commonly referred to as a “tumor”. Neoplasms or tumors or can be benign, potentially malignant (pre-cancerous), or malignant. Malignant neoplasms are commonly called cancer. They usually invade and destroy the surrounding tissue and may form metastases, i.e., they spread to other parts, tissues or organs of the body. Hence, the term “metatstatic cancer” encompasses metastases to other tissues or organs than the one of the original tumor. Lymphomas and leukemias are lymphoid neoplasms. For the purposes of the present invention, they are also encompassed by the terms “tumor” or “cancer”.

[0369] The term “viral disease” describes diseases, which are the result of a viral infection of a subject.

[0370] The term “immunological disorder” as used herein describes in line with the common definition of this term immunological disorders such as autoimmune diseases, hypersensitivities, immune deficiencies.

[0371] In one embodiment the invention provides a method for the treatment or amelioration of a cancer correlating with MUC17 expression or MUC17 overexpression, comprising the step of administering to a subject in need thereof the antibody construct of the invention, or the antibody construct produced according to the process of the invention. The MUC17×CD3 bispecific single chain antibody is particularly advantageous for the therapy of cancer, preferably solid tumors, more preferably carcinomas and prostate cancer.

[0372] The terms “subject in need” or those “in need of treatment” includes those already with the disorder, as well as those in which the disorder is to be prevented. The subject in need or “patient” includes human and other mammalian subjects that receive either prophylactic or therapeutic treatment.

[0373] The antibody construct of the invention will generally be designed for specific routes and methods of administration, for specific dosages and frequencies of administration, for specific treatments of specific diseases, with ranges of bio-availability and persistence, among other things. The materials of the composition are preferably formulated in concentrations that are acceptable for the site of administration.

[0374] Formulations and compositions thus may be designed in accordance with the invention for delivery by any suitable route of administration. In the context of the present invention, the routes of administration include, but are not limited to
[0375] topical routes (such as epicutaneous, inhalational, nasal, opthalmic, auricular/aural, vaginal, mucosal);
[0376] enteral routes (such as oral, gastrointestinal, sublingual, sublabial, buccal, rectal); and
[0377] parenteral routes (such as intravenous, intraarterial, intraosseous, intramuscular, intracerebral, intracerebroventricular, epidural, intrathecal, subcutaneous, intraperitoneal, extra-amniotic, intraarticular, intracardiac, intradermal, intralesional, intrauterine, intravesical, intravitreal, transdermal, intranasal, transmucosal, intrasynovial, intraluminal).

[0378] The pharmaceutical compositions and the antibody construct of this invention are particularly useful for parenteral administration, e.g., subcutaneous or intravenous delivery, for example by injection such as bolus injection, or by infusion such as continuous infusion. Pharmaceutical compositions may be administered using a medical device. Examples of medical devices for administering pharmaceutical compositions are described in U.S. Pat. Nos. 4,475,196; 4,439,196; 4,447,224; 4,447, 233; 4,486,194; 4,487,603; 4,596,556; 4,790,824; 4,941,880; 5,064,413; 5,312,335; 5,312,335; 5,383,851; and 5,399,163.

[0379] In particular, the present invention provides for an uninterrupted administration of the suitable composition. As a non-limiting example, uninterrupted or substantially uninterrupted, i.e. continuous administration may be realized by a small pump system worn by the patient for metering the influx of therapeutic agent into the body of the patient. The pharmaceutical composition comprising the antibody construct of the invention can be administered by using said pump systems. Such pump systems are generally known in the art, and commonly rely on periodic exchange of cartridges containing the therapeutic agent to be infused. When exchanging the cartridge in such a pump system, a temporary interruption of the otherwise uninterrupted flow of therapeutic agent into the body of the patient may ensue. In such a case, the phase of administration prior to cartridge replacement and the phase of administration following cartridge replacement would still be considered within the meaning of the pharmaceutical means and methods of the invention together make up one “uninterrupted administration” of such therapeutic agent.

[0380] The continuous or uninterrupted administration of the antibody constructs of the invention may be intravenous or subcutaneous by way of a fluid delivery device or small pump system including a fluid driving mechanism for driving fluid out of a reservoir and an actuating mechanism for actuating the driving mechanism. Pump systems for subcutaneous administration may include a needle or a cannula for penetrating the skin of a patient and delivering the suitable composition into the patient's body. Said pump systems may be directly fixed or attached to the skin of the patient independently of a vein, artery or blood vessel, thereby allowing a direct contact between the pump system and the skin of the patient. The pump system can be attached to the skin of the patient for 24 hours up to several days. The pump system may be of small size with a reservoir for small volumes. As a non-limiting example, the volume of the reservoir for the suitable pharmaceutical composition to be administered can be between 0.1 and 50 ml.

[0381] The continuous administration may also be transdermal by way of a patch worn on the skin and replaced at intervals. One of skill in the art is aware of patch systems for drug delivery suitable for this purpose. It is of note that transdermal administration is especially amenable to uninterrupted administration, as exchange of a first exhausted patch can advantageously be accomplished simultaneously with the placement of a new, second patch, for example on the surface of the skin immediately adjacent to the first exhausted patch and immediately prior to removal of the first exhausted patch. Issues of flow interruption or power cell failure do not arise.

[0382] If the pharmaceutical composition has been lyophilized, the lyophilized material is first reconstituted in an appropriate liquid prior to administration. The lyophilized material may be reconstituted in, e.g., bacteriostatic water for injection (BWFI), physiological saline, phosphate buffered saline (PBS), or the same formulation the protein had been in prior to lyophilization.

[0383] The compositions of the present invention can be administered to the subject at a suitable dose which can be determined e.g. by dose escalating studies by administration of increasing doses of the antibody construct of the invention exhibiting cross-species specificity described herein to non-chimpanzee primates, for instance macaques. As set forth above, the antibody construct of the invention exhibiting cross-species specificity described herein can be advantageously used in identical form in preclinical testing in non-chimpanzee primates and as drug in humans. The dosage regimen will be determined by the attending physician and clinical factors. As is well known in the medical arts, dosages for any one patient depend upon many factors, including the patient's size, body surface area, age, the particular compound to be administered, sex, time and route of administration, general health, and other drugs being administered concurrently.

[0384] The term “effective dose” or “effective dosage” is defined as an amount sufficient to achieve or at least partially achieve the desired effect. The term “therapeutically effective dose” is defined as an amount sufficient to cure or at least partially arrest the disease and its complications in a patient already suffering from the disease. Amounts or doses effective for this use will depend on the condition to be treated (the indication), the delivered antibody construct, the therapeutic context and objectives, the severity of the disease, prior therapy, the patient's clinical history and response to the therapeutic agent, the route of administration, the size (body weight, body surface or organ size) and/or condition (the age and general health) of the patient, and the general state of the patient's own immune system. The proper dose can be adjusted according to the judgment of the attending physician such that it can be administered to the patient once or over a series of administrations, and in order to obtain the optimal therapeutic effect.

[0385] A typical dosage may range from about 0.1 μg/kg to up to about 30 mg/kg or more, depending on the factors mentioned above. In specific embodiments, the dosage may range from 1.0 μg/kg up to about 20 mg/kg, optionally from 10 μg/kg up to about 10 mg/kg or from 100 μg/kg up to about 5 mg/kg.

[0386] A therapeutic effective amount of an antibody construct of the invention preferably results in a decrease in severity of disease symptoms, an increase in frequency or duration of disease symptom-free periods or a prevention of impairment or disability due to the disease affliction. For treating diseases correlating with MUC17 expression as described herein above, a therapeutically effective amount of the antibody construct of the invention, here: an anti-MUC17/anti-CD3 antibody construct, preferably inhibits cell growth or tumor growth by at least about 20%, at least about 40%, at least about 50%, at least about 60%, at least about 70%, at least about 80%, or at least about 90% relative to untreated patients. The ability of a compound to inhibit tumor growth may be evaluated in an animal model predictive of efficacy

[0387] The pharmaceutical composition can be administered as a sole therapeutic or in combination with additional therapies such as anti-cancer therapies as needed, e.g. other proteinaceous and non-proteinaceous drugs. These drugs may be administered simultaneously with the composition comprising the antibody construct of the invention as defined herein or separately before or after administration of said antibody construct in timely defined intervals and doses.

[0388] The term “effective and non-toxic dose” as used herein refers to a tolerable dose of an inventive antibody construct which is high enough to cause depletion of pathologic cells, tumor elimination, tumor shrinkage or stabilization of disease without or essentially without major toxic effects. Such effective and non-toxic doses may be determined e.g. by dose escalation studies described in the art and should be below the dose inducing severe adverse side events (dose limiting toxicity, DLT).

[0389] The term “toxicity” as used herein refers to the toxic effects of a drug manifested in adverse events or severe adverse events. These side events may refer to a lack of tolerability of the drug in general and/or a lack of local tolerance after administration. Toxicity could also include teratogenic or carcinogenic effects caused by the drug.

[0390] The term “safety”, “in vivo safety” or “tolerability” as used herein defines the administration of a drug without inducing severe adverse events directly after administration (local tolerance) and during a longer period of application of the drug. “Safety”, “in vivo safety” or “tolerability” can be evaluated e.g. at regular intervals during the treatment and follow-up period. Measurements include clinical evaluation, e.g. organ manifestations, and screening of laboratory abnormalities. Clinical evaluation may be carried out and deviations to normal findings recorded/coded according to NCI-CTC and/or MedDRA standards. Organ manifestations may include criteria such as allergy/immunology, blood/bone marrow, cardiac arrhythmia, coagulation and the like, as set forth e.g. in the Common Terminology Criteria for adverse events v3.0 (CTCAE). Laboratory parameters which may be tested include for instance hematology, clinical chemistry, coagulation profile and urine analysis and examination of other body fluids such as serum, plasma, lymphoid or spinal fluid, liquor and the like. Safety can thus be assessed e.g. by physical examination, imaging techniques (i.e. ultrasound, x-ray, CT scans, Magnetic Resonance Imaging (MRI), other measures with technical devices (i.e. electrocardiogram), vital signs, by measuring laboratory parameters and recording adverse events. For example, adverse events in non-chimpanzee primates in the uses and methods according to the invention may be examined by histopathological and/or histochemical methods.

[0391] The above terms are also referred to e.g. in the Preclinical safety evaluation of biotechnology-derived pharmaceuticals S6; ICH Harmonised Tripartite Guideline; ICH Steering Committee meeting on Jul. 16, 1997.

[0392] Finally, the invention provides a kit comprising an antibody construct of the invention or produced according to the process of the invention, a pharmaceutical composition of the invention, a polynucleotide of the invention, a vector of the invention and/or a host cell of the invention.

[0393] In the context of the present invention, the term “kit” means two or more components—one of which corresponding to the antibody construct, the pharmaceutical composition, the vector or the host cell of the invention—packaged together in a container, recipient or otherwise. A kit can hence be described as a set of products and/or utensils that are sufficient to achieve a certain goal, which can be marketed as a single unit.

[0394] The kit may comprise one or more recipients (such as vials, ampoules, containers, syringes, bottles, bags) of any appropriate shape, size and material (preferably waterproof, e.g. plastic or glass) containing the antibody construct or the pharmaceutical composition of the present invention in an appropriate dosage for administration (see above). The kit may additionally contain directions for use (e.g. in the form of a leaflet or instruction manual), means for administering the antibody construct of the present invention such as a syringe, pump, infuser or the like, means for reconstituting the antibody construct of the invention and/or means for diluting the antibody construct of the invention.

[0395] The invention also provides kits for a single-dose administration unit. The kit of the invention may also contain a first recipient comprising a dried/lyophilized antibody construct and a second recipient comprising an aqueous formulation. In certain embodiments of this invention, kits containing single-chambered and multi-chambered pre-filled syringes (e.g., liquid syringes and lyosyringes) are provided.

[0396] It is noted that as used herein, the singular forms “a”, “an”, and “the”, include plural references unless the context clearly indicates otherwise. Thus, for example, reference to “a reagent” includes one or more of such different reagents and reference to “the method” includes reference to equivalent steps and methods known to those of ordinary skill in the art that could be modified or substituted for the methods described herein.

[0397] Unless otherwise indicated, the term “at least” preceding a series of elements is to be understood to refer to every element in the series. Those skilled in the art will recognize, or be able to ascertain using no more than routine experimentation, many equivalents to the specific embodiments of the invention described herein. Such equivalents are intended to be encompassed by the present invention.

[0398] The term “and/or” wherever used herein includes the meaning of “and”, “or” and “all or any other combination of the elements connected by said term”.

[0399] The term “about” or “approximately” as used herein means within 20%, preferably within 10%, and more preferably within 5% of a given value or range. It includes, however, also the concrete number, e.g., about 20 includes 20.

[0400] The term “less than” or “greater than” includes the concrete number. For example, less than 20 means less than or equal to. Similarly, more than or greater than means more than or equal to, or greater than or equal to, respectively.

[0401] Throughout this specification and the claims which follow, unless the context requires otherwise, the word “comprise”, and variations such as “comprises” and “comprising”, will be understood to imply the inclusion of a stated integer or step or group of integers or steps but not the exclusion of any other integer or step or group of integer or step. When used herein the term “comprising” can be substituted with the term “containing” or “including” or sometimes when used herein with the term “having”.

[0402] When used herein “consisting of” excludes any element, step, or ingredient not specified in the claim element. When used herein, “consisting essentially of” does not exclude materials or steps that do not materially affect the basic and novel characteristics of the claim.

[0403] In each instance herein any of the terms “comprising”, “consisting essentially of” and “consisting of” may be replaced with either of the other two terms.

[0404] It should be understood that this invention is not limited to the particular methodology, protocols, material, reagents, and substances, etc., described herein and as such can vary. The terminology used herein is for the purpose of describing particular embodiments only, and is not intended to limit the scope of the present invention, which is defined solely by the claims.

[0405] All publications and patents cited throughout the text of this specification (including all patents, patent applications, scientific publications, manufacturer's specifications, instructions, etc.), whether supra or infra, are hereby incorporated by reference in their entirety. Nothing herein is to be construed as an admission that the invention is not entitled to antedate such disclosure by virtue of prior invention. To the extent the material incorporated by reference contradicts or is inconsistent with this specification, the specification will supersede any such material.

[0406] A better understanding of the present invention and of its advantages will be obtained from the following examples, offered for illustrative purposes only. The examples are not intended to limit the scope of the present invention in any way.

### EXAMPLES

### Example 1: Evaluation of MUC17 Cell Surface Expression

[0407] Cell surface levels of MUC17 were determined by flow cytometry, using a QIFIkit (Dako). Adherent cells were lifted using a non-enzymatic cell dissociation buffer (Cellstripper, Corning and then stained with the anti-MUC17 antibody 4C11. The 4C11 antibody is a monoclonal antibody generated from immunization of B6 mice with a DNA construct encompassing the EGF-SEA-EGF region of MUC17 (aa 4131-4493). MUC17 was detected by incubation with a secondary antibody conjugated to FITC and analyzed by flow cytometry. Relative antibody binding capacity was determined by QIFIkit (Dako) using bead samples provided in the kit as standards. Results are depicted in FIG. 3 (A) MUC17 gene expression levels in cancer cell lines were determined by quantitative polymerase chain reaction (qPCR) using methods and probes from Applied Biosystems/Thermo Fisher. RNA was isolated from cancer cell lines and then transcribed to cDNA. The MUC17 cDNA was amplified with probes specific to MUC17, using qPCR. Gene expression levels of MUC17 were normalized to those for a constitutively expressed gene such and depicted in FIG. 3 (B)

### Example 2: Evaluation of MUC17 Bispecific Antibody Constructs In Vitro Efficacy

[0408] Cell activity of MUC17 HLE antibody constructs was evaluated in T cell-dependent cytotoxicity (TDCC) assays. Effector cells were obtained from commercial sources, such as AllCells or Cepheus Biosciences, Inc. Human pan-T cells, human PBMC or PBMC from cynomolgus monkey were incubated at 10:1 or 5:1 with target cells expressing human or cynomolgus monkey MUC17 in the presence of a dose range of antibody constructs. After 48 h incubation, cell cytotoxicity was assessed using a luminescence assay (Cell T-glo or Steady-glo (Promega)), or high content imaging (Cellomics ArrayScan) as a readout for cellular cytotoxicity. Results are depicted in FIGS. 4 and 5.

### Example 3: Xenograft Study to Evaluate In Vivo Efficacy of MUC17 Bispecific Antibody Construct

[0409] The objective of the Xenograft study was to assess the anti-tumor activity of a half-life extended MUC17/CD3 bispecific antibody construct following intravenous administration in an advanced stage subcutaneous GSU-luc Xenograft model of human gastric cancer in female NOD/SCID mice.

[0410] Preparation of the target and effector cells for inoculation

### Target Cells:

[0411] Human gastric carcinoma cells GSU, lentivirally transduced with vector LV417-Luc, to stably express firefly luciferase (GSU-luc) were harvested, centrifuged, washed with cold DPBS, counted and adjusted to a concentration of 5×10⁷ cells/mL. A total of 5×10⁶ cells/mouse was injected subcutaneously (SC) into the right dorsal flank of female NOD/SCID mice (Vendor: Envigo) in a final volume of 100 μL.

### Effector Cells:

[0412] Human T cells were isolated from fresh blood of a healthy donor (#0801), enriched for CD3⁺ T cells using the Pan T Cell Isolation Kit (#130-096-535) and activated and expanded in vitro using the human T Cell Activation/Expansion Kit (#130-091-441, both Miltenyi Biotec) in accordance with the manufacturer's instructions.

[0413] On the day of injection, T cells were counted, isolated from beads and washed 2× with cold DPBS. Cell number were adjusted to 1×10⁸ cells/mL and stored on ice until injection. A total of 2×10⁷ cells/mouse were injected into the peritoneal cavity (IP) in a final volume of 200 μL. Cells was stored on ice prior to injection. Experimental design

Animals received MUC17 bispecific antibody constructor control item by intravenous (IV) bolus injection (into the tail vein). Mice were treated according to Table 4.

TABLE 4
Study Design Efficacy Study

| | | Target | Effector | | | | | |
|---|---|---|---|---|---|---|---|---|
| | | Cells/ | Cells/ | | | Dose | Dose | |
| | Mice/ | Mouse | Mouse | | | Level | Volume | Treatment |
| Group | Group | (SC) | (IP) | Treatment | RoA | (mg/kg) | (mL) | days |
| 1 | 5 | 5 × 10⁶ | — | Control | IV | 0 | 0.1 | 12, 19 |
| | | GSU-luc | | item | | | | |
| 2 | 10 | 5 × 10⁶ | 2 × 10⁷ | Control | IV | 0 | 0.1 | 12, 19 |
| | | GSU-luc | CD3⁺ | item | | | | |
| 3 | 10 | 5 × 10⁶ | 2 × 10⁷ | MUC17 | IV | 2.5 | 0.1 | 12, 19, 26 |
| | | GSU-luc | CD3⁺ | bispecific | | | | |
| | | | | construct | | | | |
| 4 | 10 | 5 × 10⁶ | 2 × 10⁷ | MUC17 | IV | 0.25 | 0.1 | 12, 19, 26 |
| | | GSU-luc | CD3⁺ | bispecific | | | | |
| | | | | construct | | | | |
| 5 | 10 | 5 × 10⁶ | 2 × 10⁷ | MUC17 | IV | 0.025 | 0.1 | 12, 19, 26 |
| | | GSU-luc | CD3⁺ | bispecific | | | | |
| | | | | construct | | | | |

| | | |
|---|---|---|
| | 55 | Additional animals (Residuals) to ensure equal |
| | | tumor volume at treatment start |
| Σ | 100 | Animals at study start |

Sequence of the study:
Day 1: Subcutaneous injection of tumor cells (GSU-luc) into the right dorsal flank of female NOD/Scid mice (see above). The animals were 6 weeks of age at study start.

### Day 7: Anti-asialo Treatment.

[0414] To deplete remaining NK cells/NK cell activity, mice were treated with a single dose of a polyclonal (rabbit anti-mouse) anti-asialo GM1 antibody. Anti-asialo GM1 antibody was reconstituted according to manufacturer's instruction and 50 μl of a 1:2.5 dilution with H₂O dest are injected IV into the lateral tail vein.
Day 8: Injection of CD3⁺ T cells into the peritoneal cavity of mice (see above).
Days 11, 18 and 25: FcR block.
The Fc-region of the test item was mutated to prevent binding to Fc□-receptors. However, as NOD/Scid mice lack B cells, resulting in low immunoglobulin levels, a FcR-block was performed to avoid a potential reduction of CD3⁺ effector cells by antibody-dependent cell-mediated cytotoxicity. On day 11, 18 and 25, mice received a mixture of 2.4G2 anti-Fc□R antibody (8 mg/kg) and Kiovig (400 mg/kg) by intraperitoneal bolus injection in a final volume of 200 μl per mouse per injection.
Days 12, 19 and 26: Treatment with test or control item (see Table 4).
Animals received test item (MUC17/CD3 bispecific antibody construct) or control item (vehicle) by intravenous (IV) bolus injection into the lateral tail vein on days 12, 19 and 26 according to Table 4. The dose volume was kept constant to a total of 100 μl per mouse, per injection.
The tested item was formulated in 10 mM L-Glutamic acid, 9% (w/v) Sucrose, 0.01% (w/v) PS80; pH 4.2 at a stock concentration of 1.04 mg/ml and diluted in vehicle (25 mM L-Lysine monohydrochloride, 0.002% (w/v) polysorbate 80 in 0.9% (w/v) sodium chloride pH 7.0) according to the most recently determined group mean body weight (BW). The dose concentration (c) was calculated using the formula:

$$c [ \frac{µ g}{µ l} ] = \frac{dose [ \frac{µ g}{kg} ] \times mean BW [ kg ]}{dose volume [ µ l ]}$$

### Day 33: Study end

[0415] (Experimental Investigations and Calculations.

During the course of the study, all animals were observed daily for general appearance, activity, behavior and survival. All findings and remarks were noted in the appropriate sheet in the study file. Body weights were determined 3 times per week throughout the course of the study. The progress of tumor growth was determined by measurement of tumor height and width using external caliper. Tumor growth was determined 3 times per week and tumor volumes (TV) were calculated using me formula:

$$TV = \frac{height \times {width}^{2}}{2} ,$$

where width is defined as the smaller and height is defined as the larger of the two measurements.
All measured raw data were downloaded to a computer and imported automatically into VIVO Manager software for further data management. Values not calculated by the VIVO Calculations program were calculated using the MS Excel spread sheet program or GraphPad Prism for Windows.
Graphical results are represented in FIG. 6 as group mean values ±standard error of the mean. Data were analyzed by one-way-analysis of variance (ANOVA), and differences in experimental results for tumor growth were assessed by Dunnett's post-hoc test for comparison against control group 2.
The relative tumor volume (RTV) was calculated by dividing the group mean tumor volume on day n by the group mean tumor volume on the day before treatment start (day 11).
Tumor growth inhibition was quantified for day 20, the last day when all animals in the control group were alive according to the formula:

$$Tumor growth inhibition [ \% ] = 100 - ( \frac{median tumor volume treatment group [ mm 3 ]}{median tumor volume control group [ mm 3 ]} \times 100 )$$

[0416] Results

Intravenous treatment of GSU-luc tumor-bearing mice with MUC17/CD3 bispecific antibody construct (test item, SEQ ID NO: 186) resulted in statistically significant and dose-dependent tumor growth inhibition when compared with vehicle-treated mice in the control group 2. Following treatment start on day 12, values of p<0.01 (at 0.25 mg/kg) or p<0.001 (at 2.5 mg/kg) were achieved on days 18 and 20. As the majority of animals (6/10) in the control group had to be terminated, no statistical analysis was performed after day 20. The tumor growth inhibition observed on day 20 was 24% (0.025 mg/kg), 58% (0.25 mg/kg) and 77% (2.5 mg/kg). The comparison of the relative tumor volumes (RTV) on day 20 shows, that while tumors growing in the vehicle-treated mice had on average 4.2 times larger volume relative to the day before treatment start, the RTV in the test item-treated groups were 3.4 (0.025 mg/kg), 2.4 (0.25 mg/kg) and 1.0 (2.5 mg/kg). Following treatment at 2.5 mg/kg, the RTV was <2.0 until day 29.
The comparison of the two vehicle-treated control groups revealed, that T cells had no impact on the growth of GSU-luc cells in the absence of test item. The test item was well tolerated and drug-related adverse events were neither expected nor observed, as the mouse is a non-relevant species.
In summary: Intravenous administration of bispecific antibody constructs according to the present invention (test item SEQ ID NO: 186) at 2.5 or 0.25 mg/kg resulted in a statistically significant and dose-dependent inhibition of growth of subcutaneous GSU-luc tumors in female NOD/Scid mice.

### Example 4: Exploratory Toxicology Study in Cynomolgus Monkeys

[0417] A MUC17 HLE BiTE antibody construct (SEQ ID: 186, construct 8-B7) was evaluated in an exploratory toxicology study in cynomolgus monkeys. Three monkeys were administered either 100 μg/kg or 1000 μg/kg of MUC17 scFc bispecific antibody construct by intravenous injection on Day 1 and Day 8 of the study. The MUC17 scFc bispecific antibody construct (SEQ ID NO 186) was well tolerated at both doses with no associated clinical signs or changes in body weight. Transient increases in body temperature were recorded at 100 μg/kg and 1000 μg/kg. Some hallmarks of MUC17 scFc bispecific antibody construct activity (lymphocyte redistribution, increased neutrophils and monocytes, increased c-reactive protein, slight increases in cytokines) were observed in blood samples from the monkeys treated with MUC17 scFc bispecific antibody construct. Although immunohistochemistry confirmed MUC17 expression on the apical surface of small intestine sampled from monkeys evaluated in the present exploratory toxicology study, there were no histopathological changes in the tissues expressing MUC17.

[0418] Toxicokinetic Parameters of MUC17 scFc Bispecific Antibody Construct in Cynomolgus Monkey

The toxicokinetic parameters of the MUC17 scFc bispecific antibody construct (SEQ ID NO 186) were evaluated in blood samples taken from monkeys evaluated in the exploratory toxicology study. Blood samples were collected pre-dose and at 0.083, 4, 8, 24, 48, 96, and 168 hours after each dose. The serum concentration of the MUC17 scFc bispecific antibody construct was determined by immunoassay using a ruthenylated murine anti-human IgG Fc 1.35.1 mAb directed against MUC17 to capture the antibody construct and an antibody directed against the Fc moiety to detect the construct. Serum levels of the MUC17 scFc bispecific antibody construct were detected at all time points analyzed after first dose. The data were fitted to a two-compartment model. FIG. 8 (B) shows individual data (points) and the average value (line). Several pharmacokinetic parameters were assessed, including systemic clearance (CL), inter-compartmental clearance (Q), serum volume/volume of the central compartment (Vp), tissue volume/volume of the tissue compartment (Vt), terminal half-life (t½), and for the second dose 1000 mcg/kg dose the average maximal concentration (Cₘₐₓ) and area under the serum concentration-time (AUC_{inf}).

### Example 5: T Cell Dependent Cytotoxicity Assays in Normal Intestinal Cells

[0419] To further test the idea that the localization of MUC17 to the apical surface of normal intestinal cells of human and cynomolgus monkey is inaccessible to the cytotoxic activity of the MUC17 scFc bispecific antibody construct (SEQ ID NO 186), MUC17 expression and MUC17 scFc bispecific antibody construct activity are evaluated in normal cells in vitro. MUC17 cell surface expression is assessed by fluorescence-activated cell sorting. Cytotoxic activity of the MUC17 scFc bispecific antibody construct is evaluated in T cell dependent cytotoxicity (TDCC) assays, where the MUC17 scFc bispecific antibody construct is incubated with MUC17-positive target cells and human or monkey effector cells (i.e. T cells or peripheral blood mononuclear cells) and then viability of the cells is assessed. These experiments are initially tested using standard two-dimensional cell culture. However, in order to better observe the localization of MUC17 to the apical surface, normal cells are cultured in a way that maintains epithelial cell polarity, such as growth on an extracellular matrix or in in organoid culture. MUC17 scFc bispecific antibody construct has shown no significantly increased TDCC with respect to normal, i.e. non-cancer intestinal cells.

TABLE 5
Sequence Table

| SEQ ID | | | | |
|---|---|---|---|---|
| NO: | Designation | Source | | Sequence |
| 1. | G4S linker | artificial | aa | GGGGS |
| 2. | (G4S)2 linker | artificial | aa | GGGGSGGGGS |
| 3. | (G4S)3 linker | artificial | aa | GGGGSGGGGSGGGGS |
| 4. | (G4S)4 linker | artificial | aa | GGGGSGGGGSGGGGSGGGGS |
| 5. | (G4S)5 linker | artificial | aa | GGGGSGGGGSGGGGSGGGGSGGGGS |
| 6. | (G4S)6 linker | artificial | aa | GGGGSGGGGSGGGGSGGGGSGGGGSGGGGS |
| 7. | (G4S)7 linker | artificial | aa | GGGGSGGGGSGGGGSGGGGSGGGGSGGGGSGGGGS |
| 8. | (G4S)8 linker | artificial | aa | GGGGSGGGGSGGGGSGGGGSGGGGSGGGGSGGGGSGGGGS |
| 9. | Peptide linker | artificial | aa | PGGGGS |
| 10. | Peptide linker | artificial | aa | PGGDGS |
| 11. | Peptide linker | artificial | aa | SGGGGS |
| 12. | Peptide linker | artificial | aa | GGGG |
| 13. | CD3ϵ binder VL | artificial | aa | QTVVTQEPSLTVSPGGTVTLTCGSSTGAVTSGNYPN |
| | | | | WVQQKPGQAPRGLIGGTKFLAPGTPARFSGSLLGGK |
| | | | | AALTLSGVQPEDEAEYYCVLWYSNRWVFGGGTKLT |
| | | | | VL |
| 14. | CD3ϵ binder VH | artificial | aa | EVQLVESGGGLVQPGGSLRLSCAASGFTFNSYAMN |
| | | | | WVRQAPGKGLEWVARIRSKYNNYATYYADSVKGR |
| | | | | FTISRDDSKNTAYLQMNSLKTEDTAVYYCVRHGNF |
| | | | | GNSYVSWWAYWGQGTLVTVSS |
| 15. | CD3ϵ binder scFv | artificial | aa | EVQLVESGGGLVQPGGSLRLSCAASGFTFNSYAMN |
| | | | | WVRQAPGKGLEWVARIRSKYNNYATYYADSVKGR |
| | | | | FTISRDDSKNTAYLQMNSLKTEDTAVYYCVRHGNF |
| | | | | GNSYVSWWAYWGQGTLVTVSSGGGGSGGGGSGG |
| | | | | GGSQTVVTQEPSLTVSPGGTVTLTCGSSTGAVTSGN |
| | | | | YPNWVQQKPGQAPRGLIGGTKFLAPGTPARFSGSLL |
| | | | | GGKAALTLSGVQPEDEAEYYCVLWYSNRWVFGGG |
| | | | | TKLTVL |
| 16. | hexa-histidine tag | artificial | aa | HHHHHH |
| 17. | Fc monomer-1 | artificial | aa | DKTHTCPPCPAPELLGGPSVFLFPPKPKDTLMISRTPE |
| | +c/-g | | | VTCVVVDVSHEDPEVKFNWYVDGVEVHNAKTKPC |
| | | | | EEQYGSTYRCVSVLTVLHQDWLNGKEYKCKVSNK |
| | | | | ALPAPIEKTISKAKGQPREPQVYTLPPSREEMTKNQV |
| | | | | SLTCLVKGFYPSDIAVEWESNGQPENNYKTTPPVLD |
| | | | | SDGSFFLYSKLTVDKSRWQQGNVFSCSVMHEALHN |
| | | | | HYTQKSLSLSPGK |
| 18. | Fc monomer-2 | artificial | aa | DKTHTCPPCPAPELLGGPSVFLFPPKPKDTLMISRTPE |
| | +c/-g/delGK | | | VTCVVVDVSHEDPEVKFNWYVDGVEVHNAKTKPC |
| | | | | EEQYGSTYRCVSVLTVLHQDWLNGKEYKCKVSNK |
| | | | | ALPAPIEKTISKAKGQPREPQVYTLPPSREEMTKNQV |
| | | | | SLTCLVKGFYPSDIAVEWESNGQPENNYKTTPPVLD |
| | | | | SDGSFFLYSKLTVDKSRWQQGNVFSCSVMHEALHN |
| | | | | HYTQKSLSLSP |
| 19. | Fc monomer-3 | artificial | aa | DKTHTCPPCPAPELLGGPSVFLFPPKPKDTLMISRTPE |
| | -c/+g | | | VTCVVVDVSHEDPEVKFNWYVDGVEVHNAKTKPR |
| | | | | EEQYNSTYRVVSVLTVLHQDWLNGKEYKCKVSNK |
| | | | | ALPAPIEKTISKAKGQPREPQVYTLPPSREEMTKNQV |
| | | | | SLTCLVKGFYPSDIAVEWESNGQPENNYKTTPPVLD |
| | | | | SDGSFFLYSKLTVDKSRWQQGNVFSCSVMHEALHN |
| | | | | HYTQKSLSLSPGK |
| 20. | Fc monomer-4 | artificial | aa | DKTHTCPPCPAPELLGGPSVFLFPPKPKDTLMISRTPE |
| | -c/+g/delGK | | | VTCVVVDVSHEDPEVKFNWYVDGVEVHNAKTKPR |
| | | | | EEQYNSTYRVVSVLTVLHQDWLNGKEYKCKVSNK |
| | | | | ALPAPIEKTISKAKGQPREPQVYTLPPSREEMTKNQV |
| | | | | SLTCLVKGFYPSDIAVEWESNGQPENNYKTTPPVLD |
| | | | | SDGSFFLYSKLTVDKSRWQQGNVFSCSVMHEALHN |
| | | | | HYTQKSLSLSP |
| 21. | Fc monomer-5 | artificial | aa | DKTHTCPPCPAPELLGGPSVFLFPPKPKDTLMISRTPE |
| | -c/-g | | | VTCVVVDVSHEDPEVKFNWYVDGVEVHNAKTKPR |
| | | | | EEQYGSTYRVVSVLTVLHQDWLNGKEYKCKVSNK |
| | | | | ALPAPIEKTISKAKGQPREPQVYTLPPSREEMTKNQV |
| | | | | SLTCLVKGFYPSDIAVEWESNGQPENNYKTTPPVLD |
| | | | | SDGSFFLYSKLTVDKSRWQQGNVFSCSVMHEALHN |
| | | | | HYTQKSLSLSPGK |
| 22. | Fc monomer-6 | artificial | aa | DKTHTCPPCPAPELLGGPSVFLFPPKPKDTLMISRTPE |
| | -c/-g/delGK | | | VTCVVVDVSHEDPEVKFNWYVDGVEVHNAKTKPR |
| | | | | EEQYGSTYRVVSVLTVLHQDWLNGKEYKCKVSNK |
| | | | | ALPAPIEKTISKAKGQPREPQVYTLPPSREEMTKNQV |
| | | | | SLTCLVKGFYPSDIAVEWESNGQPENNYKTTPPVLD |
| | | | | SDGSFFLYSKLTVDKSRWQQGNVFSCSVMHEALHN |
| | | | | HYTQKSLSLSP |
| 23. | Fc monomer-7 | artificial | aa | DKTHTCPPCPAPELLGGPSVFLFPPKPKDTLMISRTPE |
| | +c/+g | | | VTCVVVDVSHEDPEVKFNWYVDGVEVHNAKTKPC |
| | | | | EEQYNSTYRCVSVLTVLHQDWLNGKEYKCKVSNK |
| | | | | ALPAPIEKTISKAKGQPREPQVYTLPPSREEMTKNQV |
| | | | | SLTCLVKGFYPSDIAVEWESNGQPENNYKTTPPVLD |
| | | | | SDGSFFLYSKLTVDKSRWQQGNVFSCSVMHEALHN |
| | | | | HYTQKSLSLSPGK |
| 24. | Fc monomer-8 | artificial | aa | DKTHTCPPCPAPELLGGPSVFLFPPKPKDTLMISRTPE |
| | +c/+g/delGK | | | VTCVVVDVSHEDPEVKFNWYVDGVEVHNAKTKPC |
| | | | | EEQYNSTYRCVSVLTVLHQDWLNGKEYKCKVSNK |
| | | | | ALPAPIEKTISKAKGQPREPQVYTLPPSREEMTKNQV |
| | | | | SLTCLVKGFYPSDIAVEWESNGQPENNYKTTPPVLD |
| | | | | SDGSFFLYSKLTVDKSRWQQGNVFSCSVMHEALHN |
| | | | | HYTQKSLSLSP |
| 25. | scFc-1 | artificial | aa | DKTHTCPPCPAPELLGGPSVFLFPPKPKDTLMISRTPE |
| | | | | VTCVVVDVSHEDPEVKFNWYVDGVEVHNAKTKPC |
| | | | | EEQYGSTYRCVSVLTVLHQDWLNGKEYKCKVSNK |
| | | | | ALPAPIEKTISKAKGQPREPQVYTLPPSREEMTKNQV |
| | | | | SLTCLVKGFYPSDIAVEWESNGQPENNYKTTPPVLD |
| | | | | SDGSFFLYSKLTVDKSRWQQGNVFSCSVMHEALHN |
| | | | | HYTQKSLSLSPGKGGGGSGGGGSGGGGSGGGGSGG |
| | | | | GGSGGGGSDKTHTCPPCPAPELLGGPSVFLFPPKPKD |
| | | | | TLMISRTPEVTCVVVDVSHEDPEVKFNWYVDGVEV |
| | | | | HNAKTKPCEEQYGSTYRCVSVLTVLHQDWLNGKEY |
| | | | | KCKVSNKALPAPIEKTISKAKGQPREPQVYTLPPSRE |
| | | | | EMTKNQVSLTCLVKGFYPSDIAVEWESNGQPENNY |
| | | | | KTTPPVLDSDGSFFLYSKLTVDKSRWQQGNVFSCSV |
| | | | | MHEALHNHYTQKSLSLSPGK |
| 26. | scFc-2 | artificial | aa | DKTHTCPPCPAPELLGGPSVFLFPPKPKDTLMISRTPE |
| | | | | VTCVVVDVSHEDPEVKFNWYVDGVEVHNAKTKPC |
| | | | | EEQYGSTYRCVSVLTVLHQDWLNGKEYKCKVSNK |
| | | | | ALPAPIEKTISKAKGQPREPQVYTLPPSREEMTKNQV |
| | | | | SLTCLVKGFYPSDIAVEWESNGQPENNYKTTPPVLD |
| | | | | SDGSFFLYSKLTVDKSRWQQGNVFSCSVMHEALHN |
| | | | | HYTQKSLSLSPGGGGSGGGGSGGGGSGGGGSGGGG |
| | | | | SGGGGSDKTHTCPPCPAPELLGGPSVFLFPPKPKDTL |
| | | | | MISRTPEVTCVVVDVSHEDPEVKFNWYVDGVEVHN |
| | | | | AKTKPCEEQYGSTYRCVSVLTVLHQDWLNGKEYKC |
| | | | | KVSNKALPAPIEKTISKAKGQPREPQVYTLPPSREEM |
| | | | | TKNQVSLTCLVKGFYPSDIAVEWESNGQPENNYKTT |
| | | | | PPVLDSDGSFFLYSKLTVDKSRWQQGNVFSCSVMH |
| | | | | EALHNHYTQKSLSLSP |
| 27. | scFc-3 | artificial | aa | DKTHTCPPCPAPELLGGPSVFLFPPKPKDTLMISRTPE |
| | | | | VTCVVVDVSHEDPEVKFNWYVDGVEVHNAKTKPR |
| | | | | EEQYNSTYRVVSVLTVLHQDWLNGKEYKCKVSNK |
| | | | | ALPAPIEKTISKAKGQPREPQVYTLPPSREEMTKNQV |
| | | | | SLTCLVKGFYPSDIAVEWESNGQPENNYKTTPPVLD |
| | | | | SDGSFFLYSKLTVDKSRWQQGNVFSCSVMHEALHN |
| | | | | HYTQKSLSLSPGKGGGGSGGGGSGGGGSGGGGSGG |
| | | | | GGSGGGGSDKTHTCPPCPAPELLGGPSVFLFPPKPKD |
| | | | | TLMISRTPEVTCVVVDVSHEDPEVKFNWYVDGVEV |
| | | | | HNAKTKPREEQYNSTYRVVSVLTVLHQDWLNGKE |
| | | | | YKCKVSNKALPAPIEKTISKAKGQPREPQVYTLPPSR |
| | | | | EEMTKNQVSLTCLVKGFYPSDIAVEWESNGQPENN |
| | | | | YKTTPPVLDSDGSFFLYSKLTVDKSRWQQGNVFSCS |
| | | | | VMHEALHNHYTQKSLSLSPGK |
| 28. | scFc-4 | artificial | aa | DKTHTCPPCPAPELLGGPSVFLFPPKPKDTLMISRTPE |
| | | | | VTCVVVDVSHEDPEVKFNWYVDGVEVHNAKTKPR |
| | | | | EEQYNSTYRVVSVLTVLHQDWLNGKEYKCKVSNK |
| | | | | ALPAPIEKTISKAKGQPREPQVYTLPPSREEMTKNQV |
| | | | | SLTCLVKGFYPSDIAVEWESNGQPENNYKTTPPVLD |
| | | | | SDGSFFLYSKLTVDKSRWQQGNVFSCSVMHEALHN |
| | | | | HYTQKSLSLSPGGGGSGGGGSGGGGSGGGGSGGGG |
| | | | | SGGGGSDKTHTCPPCPAPELLGGPSVFLFPPKPKDTL |
| | | | | MISRTPEVTCVVVDVSHEDPEVKFNWYVDGVEVHN |
| | | | | AKTKPREEQYNSTYRVVSVLTVLHQDWLNGKEYKC |
| | | | | KVSNKALPAPIEKTISKAKGQPREPQVYTLPPSREEM |
| | | | | TKNQVSLTCLVKGFYPSDIAVEWESNGQPENNYKTT |
| | | | | PPVLDSDGSFFLYSKLTVDKSRWQQGNVFSCSVMH |
| | | | | EALHNHYTQKSLSLSP |
| 29. | scFc-5 | artificial | aa | DKTHTCPPCPAPELLGGPSVFLFPPKPKDTLMISRTPE |
| | | | | VTCVVVDVSHEDPEVKFNWYVDGVEVHNAKTKPR |
| | | | | EEQYGSTYRVVSVLTVLHQDWLNGKEYKCKVSNK |
| | | | | ALPAPIEKTISKAKGQPREPQVYTLPPSREEMTKNQV |
| | | | | SLTCLVKGFYPSDIAVEWESNGQPENNYKTTPPVLD |
| | | | | SDGSFFLYSKLTVDKSRWQQGNVFSCSVMHEALHN |
| | | | | HYTQKSLSLSPGKGGGGSGGGGSGGGGSGGGGSGG |
| | | | | GGSGGGGSDKTHTCPPCPAPELLGGPSVFLFPPKPKD |
| | | | | TLMISRTPEVTCVVVDVSHEDPEVKFNWYVDGVEV |
| | | | | HNAKTKPREEQYGSTYRVVSVLTVLHQDWLNGKE |
| | | | | YKCKVSNKALPAPIEKTISKAKGQPREPQVYTLPPSR |
| | | | | EEMTKNQVSLTCLVKGFYPSDIAVEWESNGQPENN |
| | | | | YKTTPPVLDSDGSFFLYSKLTVDKSRWQQGNVFSCS |
| | | | | VMHEALHNHYTQKSLSLSPGK |
| 30. | scFc-6 | artificial | aa | DKTHTCPPCPAPELLGGPSVFLFPPKPKDTLMISRTPE |
| | | | | VTCVVVDVSHEDPEVKFNWYVDGVEVHNAKTKPR |
| | | | | EEQYGSTYRVVSVLTVLHQDWLNGKEYKCKVSNK |
| | | | | ALPAPIEKTISKAKGQPREPQVYTLPPSREEMTKNQV |
| | | | | SLTCLVKGFYPSDIAVEWESNGQPENNYKTTPPVLD |
| | | | | SDGSFFLYSKLTVDKSRWQQGNVFSCSVMHEALHN |
| | | | | HYTQKSLSLSPGGGGSGGGGSGGGGSGGGGSGGGG |
| | | | | SGGGGSDKTHTCPPCPAPELLGGPSVFLFPPKPKDTL |
| | | | | MISRTPEVTCVVVDVSHEDPEVKFNWYVDGVEVHN |
| | | | | AKTKPREEQYGSTYRVVSVLTVLHQDWLNGKEYKC |
| | | | | KVSNKALPAPIEKTISKAKGQPREPQVYTLPPSREEM |
| | | | | TKNQVSLTCLVKGFYPSDIAVEWESNGQPENNYKTT |
| | | | | PPVLDSDGSFFLYSKLTVDKSRWQQGNVFSCSVMH |
| | | | | EALHNHYTQKSLSLSP |
| 31. | scFc-7 | artificial | aa | DKTHTCPPCPAPELLGGPSVFLFPPKPKDTLMISRTPE |
| | | | | VTCVVVDVSHEDPEVKFNWYVDGVEVHNAKTKPC |
| | | | | EEQYNSTYRCVSVLTVLHQDWLNGKEYKCKVSNK |
| | | | | ALPAPIEKTISKAKGQPREPQVYTLPPSREEMTKNQV |
| | | | | SLTCLVKGFYPSDIAVEWESNGQPENNYKTTPPVLD |
| | | | | SDGSFFLYSKLTVDKSRWQQGNVFSCSVMHEALHN |
| | | | | HYTQKSLSLSPGKGGGGSGGGGSGGGGSGGGGSGG |
| | | | | GGSGGGGSDKTHTCPPCPAPELLGGPSVFLFPPKPKD |
| | | | | TLMISRTPEVTCVVVDVSHEDPEVKFNWYVDGVEV |
| | | | | HNAKTKPCEEQYNSTYRCVSVLTVLHQDWLNGKEY |
| | | | | KCKVSNKALPAPIEKTISKAKGQPREPQVYTLPPSRE |
| | | | | EMTKNQVSLTCLVKGFYPSDIAVEWESNGQPENNY |
| | | | | KTTPPVLDSDGSFFLYSKLTVDKSRWQQGNVFSCSV |
| | | | | MHEALHNHYTQKSLSLSPGK |
| 32. | scFc-8 | artificial | aa | DKTHTCPPCPAPELLGGPSVFLFPPKPKDTLMISRTPE |
| | | | | VTCVVVDVSHEDPEVKFNWYVDGVEVHNAKTKPC |
| | | | | EEQYNSTYRCVSVLTVLHQDWLNGKEYKCKVSNK |
| | | | | ALPAPIEKTISKAKGQPREPQVYTLPPSREEMTKNQV |
| | | | | SLTCLVKGFYPSDIAVEWESNGQPENNYKTTPPVLD |
| | | | | SDGSFFLYSKLTVDKSRWQQGNVFSCSVMHEALHN |
| | | | | HYTQKSLSLSPGGGGSGGGGSGGGGSGGGGSGGGG |
| | | | | SGGGGSDKTHTCPPCPAPELLGGPSVFLFPPKPKDTL |
| | | | | MISRTPEVTCVVVDVSHEDPEVKFNWYVDGVEVHN |
| | | | | AKTKPCEEQYNSTYRCVSVLTVLHQDWLNGKEYKC |
| | | | | KVSNKALPAPIEKTISKAKGQPREPQVYTLPPSREEM |
| | | | | TKNQVSLTCLVKGFYPSDIAVEWESNGQPENNYKTT |
| | | | | PPVLDSDGSFFLYSKLTVDKSRWQQGNVFSCSVMH |
| | | | | EALHNHYTQKSLSLSP |
| 33. | MU 92-G6 CC x | artificial | aa | SYGMH |
| | I2C0-scFc VH | | | |
| | CDR1 | | | |
| 34. | MU 92-G6 CC x | artificial | aa | VISFEGSNKYYASSVKG |
| | I2C0-scFc VH | | | |
| | CDR2 | | | |
| 35. | MU 92-G6 CC x | artificial | aa | GAYTYGFDY |
| | I2C0-scFc VH | | | |
| | CDR3 | | | |
| 36. | MU 92-G6 CC x | artificial | aa | RASQSVNRYLA |
| | I2C0-scFc VL | | | |
| | CDR1 | | | |
| 37. | MU 92-G6 CC x | artificial | aa | GASNRAT |
| | I2C0-scFc VL | | | |
| | CDR2 | | | |
| 38. | MU 92-G6 CC x | artificial | aa | HHYGSSIFA |
| | I2C0-scFc VL | | | |
| | CDR3 | | | |
| 39. | MU 92-G6 CC x | artificial | aa | QVQLVESGGGVVQPGRSLRLSCAASGFTFSSYGMH |
| | I2C0-scFc VH | | | WVRQAPGKCLEWVAVISFEGSNKYYASSVKGRFTIS |
| | | | | RDNSKNTLYLQMNSLRAEDTAVYYCARGAYTYGF |
| | | | | DYWGQGTLVTVSS |
| 40. | MU 92-G6 CC x | artificial | aa | EIVLTQSPGTLSLSPGERATLSCRASQSVNRYLAWY |
| | I2C0-scFc VL | | | QQKPGQAPRLLIYGASNRATGIPDRFTGSGSGTDFTL |
| | | | | TISRLEPEDFAVYFCHHYGSSIFAFGCGTKVEIK |
| 41. | MU 92-G6 CC x | artificial | aa | QVQLVESGGGVVQPGRSLRLSCAASGFTFSSYGMH |
| | I2C0-scFc scFv | | | WVRQAPGKCLEWVAVISFEGSNKYYASSVKGRFTIS |
| | | | | RDNSKNTLYLQMNSLRAEDTAVYYCARGAYTYGF |
| | | | | DYWGQGTLVTVSSGGGGSGGGGSGGGGSEIVLTQS |
| | | | | PGTLSLSPGERATLSCRASQSVNRYLAWYQQKPGQ |
| | | | | APRLLIYGASNRATGIPDRFTGSGSGTDFTLTISRLEP |
| | | | | EDFAVYFCHHYGSSIFAFGCGTKVEIK |
| 42. | MU 92-G6 CC x | artificial | aa | QVQLVESGGGVVQPGRSLRLSCAASGFTFSSYGMH |
| | I2C0-scFc | | | WVRQAPGKCLEWVAVISFEGSNKYYASSVKGRFTIS |
| | Bispecific molecule | | | RDNSKNTLYLQMNSLRAEDTAVYYCARGAYTYGF |
| | | | | DYWGQGTLVTVSSGGGGSGGGGSGGGGSEIVLTQS |
| | | | | PGTLSLSPGERATLSCRASQSVNRYLAWYQQKPGQ |
| | | | | APRLLIYGASNRATGIPDRFTGSGSGTDFTLTISRLEP |
| | | | | EDFAVYFCHHYGSSIFAFGCGTKVEIKSGGGGSEVQ |
| | | | | LVESGGGLVQPGGSLKLSCAASGFTFNKYAMNWVR |
| | | | | QAPGKGLEWVARIRSKYNNYATYYADSVKDRFTIS |
| | | | | RDDSKNTAYLQMNNLKTEDTAVYYCVRHGNFGNS |
| | | | | YISYWAYWGQGTLVTVSSGGGGSGGGGSGGGGSQ |
| | | | | TVVTQEPSLTVSPGGTVTLTCGSSTGAVTSGNYPNW |
| | | | | VQQKPGQAPRGLIGGTKFLAPGTPARFSGSLLGGKA |
| | | | | ALTLSGVQPEDEAEYYCVLWYSNRWVFGGGTKLTV |
| | | | | L |
| 43. | MU 92-G6 CC x | artificial | aa | QVQLVESGGGVVQPGRSLRLSCAASGFTFSSYGMH |
| | I2C0-scFc | | | WVRQAPGKCLEWVAVISFEGSNKYYASSVKGRFTIS |
| | Bispecific HLE | | | RDNSKNTLYLQMNSLRAEDTAVYYCARGAYTYGF |
| | molecule | | | DYWGQGTLVTVSSGGGGSGGGGSGGGGSEIVLTQS |
| | | | | PGTLSLSPGERATLSCRASQSVNRYLAWYQQKPGQ |
| | | | | APRLLIYGASNRATGIPDRFTGSGSGTDFTLTISRLEP |
| | | | | EDFAVYFCHHYGSSIFAFGCGTKVEIKSGGGGSEVQ |
| | | | | LVESGGGLVQPGGSLKLSCAASGFTFNKYAMNWVR |
| | | | | QAPGKGLEWVARIRSKYNNYATYYADSVKDRFTIS |
| | | | | RDDSKNTAYLQMNNLKTEDTAVYYCVRHGNFGNS |
| | | | | YISYWAYWGQGTLVTVSSGGGGSGGGGSGGGGSQ |
| | | | | TVVTQEPSLTVSPGGTVTLTCGSSTGAVTSGNYPNW |
| | | | | VQQKPGQAPRGLIGGTKFLAPGTPARFSGSLLGGKA |
| | | | | ALTLSGVQPEDEAEYYCVLWYSNRWVFGGGTKLTV |
| | | | | LGGGGDKTHTCPPCPAPELLGGPSVFLFPPKPKDTL |
| | | | | MISRTPEVTCVVVDVSHEDPEVKFNWYVDGVEVHN |
| | | | | AKTKPCEEQYGSTYRCVSVLTVLHQDWLNGKEYKC |
| | | | | KVSNKALPAPIEKTISKAKGQPREPQVYTLPPSREEM |
| | | | | TKNQVSLTCLVKGFYPSDIAVEWESNGQPENNYKTT |
| | | | | PPVLDSDGSFFLYSKLTVDKSRWQQGNVFSCSVMH |
| | | | | EALHNHYTQKSLSLSPGKGGGGSGGGGSGGGGSGG |
| | | | | GGSGGGGSGGGGSDKTHTCPPCPAPELLGGPSVFLF |
| | | | | PPKPKDTLMISRTPEVTCVVVDVSHEDPEVKFNWYV |
| | | | | DGVEVHNAKTKPCEEQYGSTYRCVSVLTVLHQDWL |
| | | | | NGKEYKCKVSNKALPAPIEKTISKAKGQPREPQVYT |
| | | | | LPPSREEMTKNQVSLTCLVKGFYPSDIAVEWESNGQ |
| | | | | PENNYKTTPPVLDSDGSFFLYSKLTVDKSRWQQGN |
| | | | | VFSCSVMHEALHNHYTQKSLSLSPGK |
| 44. | MU 92-C12 CC x | artificial | aa | SFGMH |
| | I2C0-scFc VH | | | |
| | CDR1 | | | |
| 45. | MU 92-C12 CC x | artificial | aa | VIWFSGSNKYYAEAVKG |
| | I2C0-scFc VH | | | |
| | CDR2 | | | |
| 46. | MU 92-C12 CC x | artificial | aa | GGYTYGFDY |
| | I2C0-scFc VH | | | |
| | CDR3 | | | |
| 47. | MU 92-C12 CC x | artificial | aa | RANQAINRYLA |
| | I2C0-scFc VL | | | |
| | CDR1 | | | |
| 48. | MU 92-C12 CC x | artificial | aa | GASSRAT |
| | I2C0-scFc VL | | | |
| | CDR2 | | | |
| 49. | MU 92-C12 CC x | artificial | aa | HHYGSSIFT |
| | I2C0-scFc VL | | | |
| | CDR3 | | | |
| 50. | MU 92-C12 CC x | artificial | aa | QVQLVESGGGVVQPGRSLRLSCAASGFTFSSFGMH |
| | I2C0-scFc VH | | | WVRQAPGKCLEWVAVIWFSGSNKYYAEAVKGRFTI |
| | | | | SRDNSKNTLYLQMNNLRAEDTAVYYCARGGYTYG |
| | | | | FDYWGQGTLVTVSS |
| 51. | MU 92-C12 CC x | artificial | aa | EIVLTQSPATLSLSPGERATLSCRANQAINRYLAWYQ |
| | I2C0-scFc VL | | | QKPGQAPRLLIYGASSRATGIPDRFSGSGSGTDFTLTI |
| | | | | SRLEPEDFAVYYCHHYGSSIFTFGCGTKVEIK |
| 52. | MU 92-C12 CC x | artificial | aa | QVQLVESGGGVVQPGRSLRLSCAASGFTFSSFGMH |
| | I2C0-scFc scFv | | | WVRQAPGKCLEWVAVIWFSGSNKYYAEAVKGRFTI |
| | | | | SRDNSKNTLYLQMNNLRAEDTAVYYCARGGYTYG |
| | | | | FDYWGQGTLVTVSSGGGGSGGGGSGGGGSEIVLTQ |
| | | | | SPATLSLSPGERATLSCRANQAINRYLAWYQQKPGQ |
| | | | | APRLLIYGASSRATGIPDRFSGSGSGTDFTLTISRLEPE |
| | | | | DFAVYYCHHYGSSIFTFGCGTKVEIK |
| 53. | MU 92-C12 CC x | artificial | aa | QVQLVESGGGVVQPGRSLRLSCAASGFTFSSFGMH |
| | I2C0-scFc | | | WVRQAPGKCLEWVAVIWFSGSNKYYAEAVKGRFTI |
| | Bispecific molecule | | | SRDNSKNTLYLQMNNLRAEDTAVYYCARGGYTYG |
| | | | | FDYWGQGTLVTVSSGGGGSGGGGSGGGGSEIVLTQ |
| | | | | SPATLSLSPGERATLSCRANQAINRYLAWYQQKPGQ |
| | | | | APRLLIYGASSRATGIPDRFSGSGSGTDFTLTISRLEPE |
| | | | | DFAVYYCHHYGSSIFTFGCGTKVEIKSGGGGSEVQL |
| | | | | VESGGGLVQPGGSLKLSCAASGFTFNKYAMNWVRQ |
| | | | | APGKGLEWVARIRSKYNNYATYYADSVKDRFTISR |
| | | | | DDSKNTAYLQMNNLKTEDTAVYYCVRHGNFGNSYI |
| | | | | SYWAYWGQGTLVTVSSGGGGSGGGGSGGGGSQTV |
| | | | | VTQEPSLTVSPGGTVTLTCGSSTGAVTSGNYPNWVQ |
| | | | | QKPGQAPRGLIGGTKFLAPGTPARFSGSLLGGKAAL |
| | | | | TLSGVQPEDEAEYYCVLWYSNRWVFGGGTKLTVL |
| 54. | MU 92-C12 CC x | artificial | aa | QVQLVESGGGVVQPGRSLRLSCAASGFTFSSFGMH |
| | I2C0-scFc | | | WVRQAPGKCLEWVAVIWFSGSNKYYAEAVKGRFTI |
| | Bispecific HLE | | | SRDNSKNTLYLQMNNLRAEDTAVYYCARGGYTYG |
| | molecule | | | FDYWGQGTLVTVSSGGGGSGGGGSGGGGSEIVLTQ |
| | | | | SPATLSLSPGERATLSCRANQAINRYLAWYQQKPGQ |
| | | | | APRLLIYGASSRATGIPDRFSGSGSGTDFTLTISRLEPE |
| | | | | DFAVYYCHHYGSSIFTFGCGTKVEIKSGGGGSEVQL |
| | | | | VESGGGLVQPGGSLKLSCAASGFTFNKYAMNWVRQ |
| | | | | APGKGLEWVARIRSKYNNYATYYADSVKDRFTISR |
| | | | | DDSKNTAYLQMNNLKTEDTAVYYCVRHGNFGNSYI |
| | | | | SYWAYWGQGTLVTVSSGGGGSGGGGSGGGGSQTV |
| | | | | VTQEPSLTVSPGGTVTLTCGSSTGAVTSGNYPNWVQ |
| | | | | QKPGQAPRGLIGGTKFLAPGTPARFSGSLLGGKAAL |
| | | | | TLSGVQPEDEAEYYCVLWYSNRWVFGGGTKLTVLG |
| | | | | GGGDKTHTCPPCPAPELLGGPSVFLFPPKPKDTLMIS |
| | | | | RTPEVTCVVVDVSHEDPEVKFNWYVDGVEVHNAK |
| | | | | TKPCEEQYGSTYRCVSVLTVLHQDWLNGKEYKCKV |
| | | | | SNKALPAPIEKTISKAKGQPREPQVYTLPPSREEMTK |
| | | | | NQVSLTCLVKGFYPSDIAVEWESNGQPENNYKTTPP |
| | | | | VLDSDGSFFLYSKLTVDKSRWQQGNVFSCSVMHEA |
| | | | | LHNHYTQKSLSLSPGKGGGGSGGGGSGGGGSGGGG |
| | | | | SGGGGSGGGGSDKTHTCPPCPAPELLGGPSVFLFPPK |
| | | | | PKDTLMISRTPEVTCVVVDVSHEDPEVKFNWYVDG |
| | | | | VEVHNAKTKPCEEQYGSTYRCVSVLTVLHQDWLNG |
| | | | | KEYKCKVSNKALPAPIEKTISKAKGQPREPQVYTLPP |
| | | | | SREEMTKNQVSLTCLVKGFYPSDIAVEWESNGQPEN |
| | | | | NYKTTPPVLDSDGSFFLYSKLTVDKSRWQQGNVFSC |
| | | | | SVMHEALHNHYTQKSLSLSPGK |
| 55. | MU 32-G6 CC x | artificial | aa | NHAMH |
| | I2C0-scFc VH | | | |
| | CDR1 | | | |
| 56. | MU 32-G6 CC x | artificial | aa | GIWSEGSNKYYAESVKG |
| | I2C0-scFc VH | | | |
| | CDR2 | | | |
| 57. | MU 32-G6 CC x | artificial | aa | ATYTTGWSYFDY |
| | I2C0-scFc VH | | | |
| | CDR3 | | | |
| 58. | MU 32-G6 CC x | artificial | aa | SGDKLGDKYAS |
| | I2C0-scFc VL | | | |
| | CDR1 | | | |
| 59. | MU 32-G6 CC x | artificial | aa | QDRKRPS |
| | I2C0-scFc VL | | | |
| | CDR2 | | | |
| 60. | MU 32-G6 CC x | artificial | aa | QAYDASTWV |
| | I2C0-scFc VL | | | |
| | CDR3 | | | |
| 61. | MU 32-G6 CC x | artificial | aa | QVQLVESGGGVVQPGRSLRLSCAASGFTFSNHAMH |
| | I2C0-scFc VH | | | WVRQAPGKCLEWVAGIWSEGSNKYYAESVKGRFTI |
| | | | | SRDNSKNTLYLQMNSLRAEDTAVYYCARATYTTG |
| | | | | WSYFDYWGQGTLVTVSS |
| 62. | MU 32-G6 CC x | artificial | aa | SYELTQPPSVSVSPGQTASITCSGDKLGDKYASWYQ |
| | I2C0-scFc VL | | | QKSGQSPVLVIYQDRKRPSGIPERFSGSNSGNTATLTI |
| | | | | SGTQAMDEADYYCQAYDASTWVFGCGTQLTVL |
| 63. | MU 32-G6 CC x | artificial | aa | QVQLVESGGGVVQPGRSLRLSCAASGFTFSNHAMH |
| | I2C0-scFc scFv | | | WVRQAPGKCLEWVAGIWSEGSNKYYAESVKGRFTI |
| | | | | SRDNSKNTLYLQMNSLRAEDTAVYYCARATYTTG |
| | | | | WSYFDYWGQGTLVTVSSGGGGSGGGGSGGGGSSY |
| | | | | ELTQPPSVSVSPGQTASITCSGDKLGDKYASWYQQK |
| | | | | SGQSPVLVIYQDRKRPSGIPERFSGSNSGNTATLTISG |
| | | | | TQAMDEADYYCQAYDASTWVFGCGTQLTVL |
| 64. | MU 32-G6 CC x | artificial | aa | QVQLVESGGGVVQPGRSLRLSCAASGFTFSNHAMH |
| | I2C0-scFc | | | WVRQAPGKCLEWVAGIWSEGSNKYYAESVKGRFTI |
| | Bispecific molecule | | | SRDNSKNTLYLQMNSLRAEDTAVYYCARATYTTG |
| | | | | WSYFDYWGQGTLVTVSSGGGGSGGGGSGGGGSSY |
| | | | | ELTQPPSVSVSPGQTASITCSGDKLGDKYASWYQQK |
| | | | | SGQSPVLVIYQDRKRPSGIPERFSGSNSGNTATLTISG |
| | | | | TQAMDEADYYCQAYDASTWVFGCGTQLTVLSGGG |
| | | | | GSEVQLVESGGGLVQPGGSLKLSCAASGFTFNKYA |
| | | | | MNWVRQAPGKGLEWVARIRSKYNNYATYYADSVK |
| | | | | DRFTISRDDSKNTAYLQMNNLKTEDTAVYYCVRHG |
| | | | | NFGNSYISYWAYWGQGTLVTVSSGGGGSGGGGSGG |
| | | | | GGSQTVVTQEPSLTVSPGGTVTLTCGSSTGAVTSGN |
| | | | | YPNWVQQKPGQAPRGLIGGTKFLAPGTPARFSGSLL |
| | | | | GGKAALTLSGVQPEDEAEYYCVLWYSNRWVFGGG |
| | | | | TKLTVL |
| 65. | MU 32-G6 CC x | artificial | aa | QVQLVESGGGVVQPGRSLRLSCAASGFTFSNHAMH |
| | I2C0-scFc | | | WVRQAPGKCLEWVAGIWSEGSNKYYAESVKGRFTI |
| | Bispecific HLE | | | SRDNSKNTLYLQMNSLRAEDTAVYYCARATYTTG |
| | molecule | | | WSYFDYWGQGTLVTVSSGGGGSGGGGSGGGGSSY |
| | | | | ELTQPPSVSVSPGQTASITCSGDKLGDKYASWYQQK |
| | | | | SGQSPVLVIYQDRKRPSGIPERFSGSNSGNTATLTISG |
| | | | | TQAMDEADYYCQAYDASTWVFGCGTQLTVLSGGG |
| | | | | GSEVQLVESGGGLVQPGGSLKLSCAASGFTFNKYA |
| | | | | MNWVRQAPGKGLEWVARIRSKYNNYATYYADSVK |
| | | | | DRFTISRDDSKNTAYLQMNNLKTEDTAVYYCVRHG |
| | | | | NFGNSYISYWAYWGQGTLVTVSSGGGGSGGGGSGG |
| | | | | GGSQTVVTQEPSLTVSPGGTVTLTCGSSTGAVTSGN |
| | | | | YPNWVQQKPGQAPRGLIGGTKFLAPGTPARFSGSLL |
| | | | | GGKAALTLSGVQPEDEAEYYCVLWYSNRWVFGGG |
| | | | | TKLTVLGGGGDKTHTCPPCPAPELLGGPSVFLFPPKP |
| | | | | KDTLMISRTPEVTCVVVDVSHEDPEVKFNWYVDGV |
| | | | | EVHNAKTKPCEEQYGSTYRCVSVLTVLHQDWLNGK |
| | | | | EYKCKVSNKALPAPIEKTISKAKGQPREPQVYTLPPS |
| | | | | REEMTKNQVSLTCLVKGFYPSDIAVEWESNGQPEN |
| | | | | NYKTTPPVLDSDGSFFLYSKLTVDKSRWQQGNVFSC |
| | | | | SVMHEALHNHYTQKSLSLSPGKGGGGSGGGGSGGG |
| | | | | GSGGGGSGGGGSGGGGSDKTHTCPPCPAPELLGGPS |
| | | | | VFLFPPKPKDTLMISRTPEVTCVVVDVSHEDPEVKFN |
| | | | | WYVDGVEVHNAKTKPCEEQYGSTYRCVSVLTVLH |
| | | | | QDWLNGKEYKCKVSNKALPAPIEKTISKAKGQPREP |
| | | | | QVYTLPPSREEMTKNQVSLTCLVKGFYPSDIAVEWE |
| | | | | SNGQPENNYKTTPPVLDSDGSFFLYSKLTVDKSRWQ |
| | | | | QGNVFSCSVMHEALHNHYTQKSLSLSPGK |
| 66. | MU 9-C2 CC x | artificial | aa | NFGMH |
| | I2C0-scFc VH | | | |
| | CDR1 | | | |
| 67. | MU 9-C2 CC x | artificial | aa | VIWFDASKTYYASSVKG |
| | I2C0-scFc VH | | | |
| | CDR2 | | | |
| 68. | MU 9-C2 CC x | artificial | aa | ATYSTGWSYFDY |
| | I2C0-scFc VH | | | |
| | CDR3 | | | |
| 69. | MU 9-C2 CC x | artificial | aa | SGDKLGDKYTS |
| | I2C0-scFc VL | | | |
| | CDR1 | | | |
| 70. | MU 9-C2 CC x | artificial | aa | HDAKRPS |
| | I2C0-scFc VL | | | |
| | CDR2 | | | |
| 71. | MU 9-C2 CC x | artificial | aa | QAWDASTAWV |
| | I2C0-scFc VL | | | |
| | CDR3 | | | |
| 72. | MU 9-C2 CC x | artificial | aa | QVQLVESGGGVVQPGRSLRLSCAASGFTFSNFGMH |
| | I2C0-scFc VH | | | WVRQAPGKCLEWVAVIWFDASKTYYASSVKGRFTI |
| | | | | SRDTSMNTLYLQMNSLRAEDTAVYYCARATYSTG |
| | | | | WSYFDYWGQGTLVTVSS |
| 73. | MU 9-C2 CC x | artificial | aa | SYELTQPPSVSVSPGQTASITCSGDKLGDKYTSWYQ |
| | I2C0-scFc VL | | | QKPGQSPVLVIYHDAKRPSGIPERFSGSNSGNTATLTI |
| | | | | SGTQAMDEADYYCQAWDASTAWVFGCGTKLTVL |
| 74. | MU 9-C2 CC x | artificial | aa | QVQLVESGGGVVQPGRSLRLSCAASGFTFSNFGMH |
| | I2C0-scFc scFv | | | WVRQAPGKCLEWVAVIWFDASKTYYASSVKGRFTI |
| | | | | SRDTSMNTLYLQMNSLRAEDTAVYYCARATYSTG |
| | | | | WSYFDYWGQGTLVTVSSGGGGSGGGGSGGGGSSY |
| | | | | ELTQPPSVSVSPGQTASITCSGDKLGDKYTSWYQQK |
| | | | | PGQSPVLVIYHDAKRPSGIPERFSGSNSGNTATLTISG |
| | | | | TQAMDEADYYCQAWDASTAWVFGCGTKLTVL |
| 75. | MU 9-C2 CC x | artificial | aa | QVQLVESGGGVVQPGRSLRLSCAASGFTFSNFGMH |
| | I2C0-scFc | | | WVRQAPGKCLEWVAVIWFDASKTYYASSVKGRFTI |
| | Bispecific molecule | | | SRDTSMNTLYLQMNSLRAEDTAVYYCARATYSTG |
| | | | | WSYFDYWGQGTLVTVSSGGGGSGGGGSGGGGSSY |
| | | | | ELTQPPSVSVSPGQTASITCSGDKLGDKYTSWYQQK |
| | | | | PGQSPVLVIYHDAKRPSGIPERFSGSNSGNTATLTISG |
| | | | | TQAMDEADYYCQAWDASTAWVFGCGTKLTVLSGG |
| | | | | GGSEVQLVESGGGLVQPGGSLKLSCAASGFTFNKYA |
| | | | | MNWVRQAPGKGLEWVARIRSKYNNYATYYADSVK |
| | | | | DRFTISRDDSKNTAYLQMNNLKTEDTAVYYCVRHG |
| | | | | NFGNSYISYWAYWGQGTLVTVSSGGGGSGGGGSGG |
| | | | | GGSQTVVTQEPSLTVSPGGTVTLTCGSSTGAVTSGN |
| | | | | YPNWVQQKPGQAPRGLIGGTKFLAPGTPARFSGSLL |
| | | | | GGKAALTLSGVQPEDEAEYYCVLWYSNRWVFGGG |
| | | | | TKLTVL |
| 76. | MU 9-C2 CC x | artificial | aa | QVQLVESGGGVVQPGRSLRLSCAASGFTFSNFGMH |
| | I2C0-scFc | | | WVRQAPGKCLEWVAVIWFDASKTYYASSVKGRFTI |
| | Bispecific HLE | | | SRDTSMNTLYLQMNSLRAEDTAVYYCARATYSTG |
| | molecule | | | WSYFDYWGQGTLVTVSSGGGGSGGGGSGGGGSSY |
| | | | | ELTQPPSVSVSPGQTASITCSGDKLGDKYTSWYQQK |
| | | | | PGQSPVLVIYHDAKRPSGIPERFSGSNSGNTATLTISG |
| | | | | TQAMDEADYYCQAWDASTAWVFGCGTKLTVLSGG |
| | | | | GGSEVQLVESGGGLVQPGGSLKLSCAASGFTFNKYA |
| | | | | MNWVRQAPGKGLEWVARIRSKYNNYATYYADSVK |
| | | | | DRFTISRDDSKNTAYLQMNNLKTEDTAVYYCVRHG |
| | | | | NFGNSYISYWAYWGQGTLVTVSSGGGGSGGGGSGG |
| | | | | GGSQTVVTQEPSLTVSPGGTVTLTCGSSTGAVTSGN |
| | | | | YPNWVQQKPGQAPRGLIGGTKFLAPGTPARFSGSLL |
| | | | | GGKAALTLSGVQPEDEAEYYCVLWYSNRWVFGGG |
| | | | | TKLTVLGGGGDKTHTCPPCPAPELLGGPSVFLFPPKP |
| | | | | KDTLMISRTPEVTCVVVDVSHEDPEVKFNWYVDGV |
| | | | | EVHNAKTKPCEEQYGSTYRCVSVLTVLHQDWLNGK |
| | | | | EYKCKVSNKALPAPIEKTISKAKGQPREPQVYTLPPS |
| | | | | REEMTKNQVSLTCLVKGFYPSDIAVEWESNGQPEN |
| | | | | NYKTTPPVLDSDGSFFLYSKLTVDKSRWQQGNVFSC |
| | | | | SVMHEALHNHYTQKSLSLSPGKGGGGSGGGGSGGG |
| | | | | GSGGGGSGGGGSGGGGSDKTHTCPPCPAPELLGGPS |
| | | | | VFLFPPKPKDTLMISRTPEVTCVVVDVSHEDPEVKFN |
| | | | | WYVDGVEVHNAKTKPCEEQYGSTYRCVSVLTVLH |
| | | | | QDWLNGKEYKCKVSNKALPAPIEKTISKAKGQPREP |
| | | | | QVYTLPPSREEMTKNQVSLTCLVKGFYPSDIAVEWE |
| | | | | SNGQPENNYKTTPPVLDSDGSFFLYSKLTVDKSRWQ |
| | | | | QGNVFSCSVMHEALHNHYTQKSLSLSPGK |
| 77. | MU 8-H9 CC x | artificial | aa | GYYWS |
| | I2C0-scFc VH | | | |
| | CDR1 | | | |
| 78. | MU 8-H9 CC x | artificial | aa | DIEHSGSTKYNPSLKS |
| | I2C0-scFc VH | | | |
| | CDR2 | | | |
| 79. | MU 8-H9 CC x | artificial | aa | KKYSTVWSYFDY |
| | I2C0-scFc VH | | | |
| | CDR3 | | | |
| 80. | MU 8-H9 CC x | artificial | aa | SGDKLGDKYAS |
| | I2C0-scFc VL | | | |
| | CDR1 | | | |
| 81. | MU 8-H9 CC x | artificial | aa | HDNKRPS |
| | I2C0-scFc VL | | | |
| | CDR2 | | | |
| 82. | MU 8-H9 CC x | artificial | aa | QAYGSSSAV |
| | I2C0-scFc VL | | | |
| | CDR3 | | | |
| 83. | MU 8-H9 CC x | artificial | aa | QVQLQQWGAGLLKPSETLSLTCAVYGGSFSGYYWS |
| | I2C0-scFc VH | | | WIRQPPGKCLEWIGDIEHSGSTKYNPSLKSRVTISLD |
| | | | | TSKNQFSLKLNSVTAADTAVYFCARKKYSTVWSYF |
| | | | | DYWGQGTLVTVSS |
| 84. | MU 8-H9 CC x | artificial | aa | SYELTQSPSASVSPGQTASITCSGDKLGDKYASWYQ |
| | I2C0-scFc VL | | | QKPGQSPVLVIYHDNKRPSGIPERFSGSNSGNTATLTI |
| | | | | SGTQAMDEADYYCQAYGSSSAVFGCGTKLTVL |
| 85. | MU 8-H9 CC x | artificial | aa | QVQLQQWGAGLLKPSETLSLTCAVYGGSFSGYYWS |
| | I2C0-scFc scFv | | | WIRQPPGKCLEWIGDIEHSGSTKYNPSLKSRVTISLD |
| | | | | TSKNQFSLKLNSVTAADTAVYFCARKKYSTVWSYF |
| | | | | DYWGQGTLVTVSSGGGGSGGGGSGGGGSSYELTQS |
| | | | | PSASVSPGQTASITCSGDKLGDKYASWYQQKPGQSP |
| | | | | VLVIYHDNKRPSGIPERFSGSNSGNTATLTISGTQAM |
| | | | | DEADYYCQAYGSSSAVFGCGTKLTVL |
| 86. | MU 8-H9 CC x | artificial | aa | QVQLQQWGAGLLKPSETLSLTCAVYGGSFSGYYWS |
| | I2C0-scFc | | | WIRQPPGKCLEWIGDIEHSGSTKYNPSLKSRVTISLD |
| | Bispecific molecule | | | TSKNQFSLKLNSVTAADTAVYFCARKKYSTVWSYF |
| | | | | DYWGQGTLVTVSSGGGGSGGGGSGGGGSSYELTQS |
| | | | | PSASVSPGQTASITCSGDKLGDKYASWYQQKPGQSP |
| | | | | VLVIYHDNKRPSGIPERFSGSNSGNTATLTISGTQAM |
| | | | | DEADYYCQAYGSSSAVFGCGTKLTVLSGGGGSEVQ |
| | | | | LVESGGGLVQPGGSLKLSCAASGFTFNKYAMNWVR |
| | | | | QAPGKGLEWVARIRSKYNNYATYYADSVKDRFTIS |
| | | | | RDDSKNTAYLQMNNLKTEDTAVYYCVRHGNFGNS |
| | | | | YISYWAYWGQGTLVTVSSGGGGSGGGGSGGGGSQ |
| | | | | TVVTQEPSLTVSPGGTVTLTCGSSTGAVTSGNYPNW |
| | | | | VQQKPGQAPRGLIGGTKFLAPGTPARFSGSLLGGKA |
| | | | | ALTLSGVQPEDEAEYYCVLWYSNRWVFGGGTKLTV |
| | | | | L |
| 87. | MU 8-H9 CC x | artificial | aa | QVQLQQWGAGLLKPSETLSLTCAVYGGSFSGYYWS |
| | I2C0-scFc | | | WIRQPPGKCLEWIGDIEHSGSTKYNPSLKSRVTISLD |
| | Bispecific HLE | | | TSKNQFSLKLNSVTAADTAVYFCARKKYSTVWSYF |
| | molecule | | | DYWGQGTLVTVSSGGGGSGGGGSGGGGSSYELTQS |
| | | | | PSASVSPGQTASITCSGDKLGDKYASWYQQKPGQSP |
| | | | | VLVIYHDNKRPSGIPERFSGSNSGNTATLTISGTQAM |
| | | | | DEADYYCQAYGSSSAVFGCGTKLTVLSGGGGSEVQ |
| | | | | LVESGGGLVQPGGSLKLSCAASGFTFNKYAMNWVR |
| | | | | QAPGKGLEWVARIRSKYNNYATYYADSVKDRFTIS |
| | | | | RDDSKNTAYLQMNNLKTEDTAVYYCVRHGNFGNS |
| | | | | YISYWAYWGQGTLVTVSSGGGGSGGGGSGGGGSQ |
| | | | | TVVTQEPSLTVSPGGTVTLTCGSSTGAVTSGNYPNW |
| | | | | VQQKPGQAPRGLIGGTKFLAPGTPARFSGSLLGGKA |
| | | | | ALTLSGVQPEDEAEYYCVLWYSNRWVFGGGTKLTV |
| | | | | LGGGGDKTHTCPPCPAPELLGGPSVFLFPPKPKDTL |
| | | | | MISRTPEVTCVVVDVSHEDPEVKFNWYVDGVEVHN |
| | | | | AKTKPCEEQYGSTYRCVSVLTVLHQDWLNGKEYKC |
| | | | | KVSNKALPAPIEKTISKAKGQPREPQVYTLPPSREEM |
| | | | | TKNQVSLTCLVKGFYPSDIAVEWESNGQPENNYKTT |
| | | | | PPVLDSDGSFFLYSKLTVDKSRWQQGNVFSCSVMH |
| | | | | EALHNHYTQKSLSLSPGKGGGGSGGGGSGGGGSGG |
| | | | | GGSGGGGSGGGGSDKTHTCPPCPAPELLGGPSVFLF |
| | | | | PPKPKDTLMISRTPEVTCVVVDVSHEDPEVKFNWYV |
| | | | | DGVEVHNAKTKPCEEQYGSTYRCVSVLTVLHQDWL |
| | | | | NGKEYKCKVSNKALPAPIEKTISKAKGQPREPQVYT |
| | | | | LPPSREEMTKNQVSLTCLVKGFYPSDIAVEWESNGQ |
| | | | | PENNYKTTPPVLDSDGSFFLYSKLTVDKSRWQQGN |
| | | | | VFSCSVMHEALHNHYTQKSLSLSPGK |
| 88. | MU 8-H8 CC x | artificial | aa | GYYWS |
| | I2C0-scFc VH | | | |
| | CDR1 | | | |
| 89. | MU 8-H8 CC x | artificial | aa | DIDASGSTKYNPSLKS |
| | I2C0-scFc VH | | | |
| | CDR2 | | | |
| 90. | MU 8-H8 CC x | artificial | aa | KKYSTVWSYFDY |
| | I2C0-scFc VH | | | |
| | CDR3 | | | |
| 91. | MU 8-H8 CC x | artificial | aa | SGDKLGDKYAS |
| | I2C0-scFc VL | | | |
| | CDR1 | | | |
| 92. | MU 8-H8 CC x | artificial | aa | QDRKRPS |
| | I2C0-scFc VL | | | |
| | CDR2 | | | |
| 93. | MU 8-H8 CC x | artificial | aa | QAWGSSTAV |
| | I2C0-scFc VL | | | |
| | CDR3 | | | |
| 94. | MU 8-H8 CC x | artificial | aa | QVQLQQWGAGLLKPSETLSLTCAVYGGSFSGYYWS |
| | I2C0-scFc VH | | | WIRQPPGKCLEWIGDIDASGSTKYNPSLKSRVTISLD |
| | | | | TSKNQFSLKLNSVTAADTAVYFCARKKYSTVWSYF |
| | | | | DYWGQGTLVTVSS |
| 95. | MU 8-H8 CC x | artificial | aa | SYELTQPPSVSVPPGQTASITCSGDKLGDKYASWYQ |
| | I2C0-scFc VL | | | QKPGQSPVLIIYQDRKRPSGVPERFSGSNSGNTATLTI |
| | | | | SGTQAMDEADYYCQAWGSSTAVFGCGTKLTVL |
| 96. | MU 8-H8 CC x | artificial | aa | QVQLQQWGAGLLKPSETLSLTCAVYGGSFSGYYWS |
| | I2C0-scFc scFv | | | WIRQPPGKCLEWIGDIDASGSTKYNPSLKSRVTISLD |
| | | | | TSKNQFSLKLNSVTAADTAVYFCARKKYSTVWSYF |
| | | | | DYWGQGTLVTVSSGGGGSGGGGSGGGGSSYELTQP |
| | | | | PSVSVPPGQTASITCSGDKLGDKYASWYQQKPGQSP |
| | | | | VLIIYQDRKRPSGVPERFSGSNSGNTATLTISGTQAM |
| | | | | DEADYYCQAWGSSTAVFGCGTKLTVL |
| 97. | MU 8-H8 CC x | artificial | aa | QVQLQQWGAGLLKPSETLSLTCAVYGGSFSGYYWS |
| | I2C0-scFc | | | WIRQPPGKCLEWIGDIDASGSTKYNPSLKSRVTISLD |
| | Bispecific molecule | | | TSKNQFSLKLNSVTAADTAVYFCARKKYSTVWSYF |
| | | | | DYWGQGTLVTVSSGGGGSGGGGSGGGGSSYELTQP |
| | | | | PSVSVPPGQTASITCSGDKLGDKYASWYQQKPGQSP |
| | | | | VLIIYQDRKRPSGVPERFSGSNSGNTATLTISGTQAM |
| | | | | DEADYYCQAWGSSTAVFGCGTKLTVLSGGGGSEVQ |
| | | | | LVESGGGLVQPGGSLKLSCAASGFTFNKYAMNWVR |
| | | | | QAPGKGLEWVARIRSKYNNYATYYADSVKDRFTIS |
| | | | | RDDSKNTAYLQMNNLKTEDTAVYYCVRHGNFGNS |
| | | | | YISYWAYWGQGTLVTVSSGGGGSGGGGSGGGGSQ |
| | | | | TVVTQEPSLTVSPGGTVTLTCGSSTGAVTSGNYPNW |
| | | | | VQQKPGQAPRGLIGGTKFLAPGTPARFSGSLLGGKA |
| | | | | ALTLSGVQPEDEAEYYCVLWYSNRWVFGGGTKLTV |
| | | | | L |
| 98. | MU 8-H8 CC x | artificial | aa | QVQLQQWGAGLLKPSETLSLTCAVYGGSFSGYYWS |
| | I2C0-scFc | | | WIRQPPGKCLEWIGDIDASGSTKYNPSLKSRVTISLD |
| | Bispecific HLE | | | TSKNQFSLKLNSVTAADTAVYFCARKKYSTVWSYF |
| | molecule | | | DYWGQGTLVTVSSGGGGSGGGGSGGGGSSYELTQP |
| | | | | PSVSVPPGQTASITCSGDKLGDKYASWYQQKPGQSP |
| | | | | VLIIYQDRKRPSGVPERFSGSNSGNTATLTISGTQAM |
| | | | | DEADYYCQAWGSSTAVFGCGTKLTVLSGGGGSEVQ |
| | | | | LVESGGGLVQPGGSLKLSCAASGFTFNKYAMNWVR |
| | | | | QAPGKGLEWVARIRSKYNNYATYYADSVKDRFTIS |
| | | | | RDDSKNTAYLQMNNLKTEDTAVYYCVRHGNFGNS |
| | | | | YISYWAYWGQGTLVTVSSGGGGSGGGGSGGGGSQ |
| | | | | TVVTQEPSLTVSPGGTVTLTCGSSTGAVTSGNYPNW |
| | | | | VQQKPGQAPRGLIGGTKFLAPGTPARFSGSLLGGKA |
| | | | | ALTLSGVQPEDEAEYYCVLWYSNRWVFGGGTKLTV |
| | | | | LGGGGDKTHTCPPCPAPELLGGPSVFLFPPKPKDTL |
| | | | | MISRTPEVTCVVVDVSHEDPEVKFNWYVDGVEVHN |
| | | | | AKTKPCEEQYGSTYRCVSVLTVLHQDWLNGKEYKC |
| | | | | KVSNKALPAPIEKTISKAKGQPREPQVYTLPPSREEM |
| | | | | TKNQVSLTCLVKGFYPSDIAVEWESNGQPENNYKTT |
| | | | | PPVLDSDGSFFLYSKLTVDKSRWQQGNVFSCSVMH |
| | | | | EALHNHYTQKSLSLSPGKGGGGSGGGGSGGGGSGG |
| | | | | GGSGGGGSGGGGSDKTHTCPPCPAPELLGGPSVFLF |
| | | | | PPKPKDTLMISRTPEVTCVVVDVSHEDPEVKFNWYV |
| | | | | DGVEVHNAKTKPCEEQYGSTYRCVSVLTVLHQDWL |
| | | | | NGKEYKCKVSNKALPAPIEKTISKAKGQPREPQVYT |
| | | | | LPPSREEMTKNQVSLTCLVKGFYPSDIAVEWESNGQ |
| | | | | PENNYKTTPPVLDSDGSFFLYSKLTVDKSRWQQGN |
| | | | | VFSCSVMHEALHNHYTQKSLSLSPGK |
| 99. | MU 8-H5 CC x | artificial | aa | SFGMH |
| | I2C0-scFc VH | | | |
| | CDR1 | | | |
| 100. | MU 8-H5 CC x | artificial | aa | VIWFDASNKYYAESVKG |
| | I2C0-scFc VH | | | |
| | CDR2 | | | |
| 101. | MU 8-H5 CC x | artificial | aa | GGYTYGFDY |
| | I2C0-scFc VH | | | |
| | CDR3 | | | |
| 102. | MU 8-H5 CC x | artificial | aa | RASQAVNRYLA |
| | I2C0-scFc VL | | | |
| | CDR1 | | | |
| 103. | MU 8-H5 CC x | artificial | aa | GASSRAT |
| | I2C0-scFc VL | | | |
| | CDR2 | | | |
| 104. | MU 8-H5 CC x | artificial | aa | QQYGSSIFT |
| | I2C0-scFc VL | | | |
| | CDR3 | | | |
| 105. | MU 8-H5 CC x | artificial | aa | QVQLVESGGGVVQPGRSLRLSCAASGFTFSSFGMH |
| | I2C0-scFc VH | | | WVRQAPGKCLEWVAVIWFDASNKYYAESVKGRFTI |
| | | | | SRDNSKNTLYLQMNSLRAEDTAVYYCARGGYTYGF |
| | | | | DYWGQGTLVTVSS |
| 106. | MU 8-H5 CC x | artificial | aa | EIVLTQSPGTLSLSPGERATLSCRASQAVNRYLAWY |
| | I2C0-scFc VL | | | QQKPGQAPRLLIYGASSRATGIPDRFSGSGSGTDFTL |
| | | | | TISRLEPEDFAVYYCQQYGSSIFTFGCGTKVEIK |
| 107. | MU 8-H5 CC x | artificial | aa | QVQLVESGGGVVQPGRSLRLSCAASGFTFSSFGMH |
| | I2C0-scFc scFv | | | WVRQAPGKCLEWVAVIWFDASNKYYAESVKGRFTI |
| | | | | SRDNSKNTLYLQMNSLRAEDTAVYYCARGGYTYGF |
| | | | | DYWGQGTLVTVSSGGGGSGGGGSGGGGSEIVLTQS |
| | | | | PGTLSLSPGERATLSCRASQAVNRYLAWYQQKPGQ |
| | | | | APRLLIYGASSRATGIPDRFSGSGSGTDFTLTISRLEPE |
| | | | | DFAVYYCQQYGSSIFTFGCGTKVEIK |
| 108. | MU 8-H5 CC x | artificial | aa | QVQLVESGGGVVQPGRSLRLSCAASGFTFSSFGMH |
| | I2C0-scFc | | | WVRQAPGKCLEWVAVIWFDASNKYYAESVKGRFTI |
| | Bispecific molecule | | | SRDNSKNTLYLQMNSLRAEDTAVYYCARGGYTYGF |
| | | | | DYWGQGTLVTVSSGGGGSGGGGSGGGGSEIVLTQS |
| | | | | PGTLSLSPGERATLSCRASQAVNRYLAWYQQKPGQ |
| | | | | APRLLIYGASSRATGIPDRFSGSGSGTDFTLTISRLEPE |
| | | | | DFAVYYCQQYGSSIFTFGCGTKVEIKSGGGGSEVQL |
| | | | | VESGGGLVQPGGSLKLSCAASGFTFNKYAMNWVRQ |
| | | | | APGKGLEWVARIRSKYNNYATYYADSVKDRFTISR |
| | | | | DDSKNTAYLQMNNLKTEDTAVYYCVRHGNFGNSYI |
| | | | | SYWAYWGQGTLVTVSSGGGGSGGGGSGGGGSQTV |
| | | | | VTQEPSLTVSPGGTVTLTCGSSTGAVTSGNYPNWVQ |
| | | | | QKPGQAPRGLIGGTKFLAPGTPARFSGSLLGGKAAL |
| | | | | TLSGVQPEDEAEYYCVLWYSNRWVFGGGTKLTVL |
| 109. | MU 8-H5 CC x | artificial | aa | QVQLVESGGGVVQPGRSLRLSCAASGFTFSSFGMH |
| | I2C0-scFc | | | WVRQAPGKCLEWVAVIWFDASNKYYAESVKGRFTI |
| | Bispecific HLE | | | SRDNSKNTLYLQMNSLRAEDTAVYYCARGGYTYGF |
| | molecule | | | DYWGQGTLVTVSSGGGGSGGGGSGGGGSEIVLTQS |
| | | | | PGTLSLSPGERATLSCRASQAVNRYLAWYQQKPGQ |
| | | | | APRLLIYGASSRATGIPDRFSGSGSGTDFTLTISRLEPE |
| | | | | DFAVYYCQQYGSSIFTFGCGTKVEIKSGGGGSEVQL |
| | | | | VESGGGLVQPGGSLKLSCAASGFTFNKYAMNWVRQ |
| | | | | APGKGLEWVARIRSKYNNYATYYADSVKDRFTISR |
| | | | | DDSKNTAYLQMNNLKTEDTAVYYCVRHGNFGNSYI |
| | | | | SYWAYWGQGTLVTVSSGGGGSGGGGSGGGGSQTV |
| | | | | VTQEPSLTVSPGGTVTLTCGSSTGAVTSGNYPNWVQ |
| | | | | QKPGQAPRGLIGGTKFLAPGTPARFSGSLLGGKAAL |
| | | | | TLSGVQPEDEAEYYCVLWYSNRWVFGGGTKLTVLG |
| | | | | GGGDKTHTCPPCPAPELLGGPSVFLFPPKPKDTLMIS |
| | | | | RTPEVTCVVVDVSHEDPEVKFNWYVDGVEVHNAK |
| | | | | TKPCEEQYGSTYRCVSVLTVLHQDWLNGKEYKCKV |
| | | | | SNKALPAPIEKTISKAKGQPREPQVYTLPPSREEMTK |
| | | | | NQVSLTCLVKGFYPSDIAVEWESNGQPENNYKTTPP |
| | | | | VLDSDGSFFLYSKLTVDKSRWQQGNVFSCSVMHEA |
| | | | | LHNHYTQKSLSLSPGKGGGGSGGGGSGGGGSGGGG |
| | | | | SGGGGSGGGGSDKTHTCPPCPAPELLGGPSVFLFPPK |
| | | | | PKDTLMISRTPEVTCVVVDVSHEDPEVKFNWYVDG |
| | | | | VEVHNAKTKPCEEQYGSTYRCVSVLTVLHQDWLNG |
| | | | | KEYKCKVSNKALPAPIEKTISKAKGQPREPQVYTLPP |
| | | | | SREEMTKNQVSLTCLVKGFYPSDIAVEWESNGQPEN |
| | | | | NYKTTPPVLDSDGSFFLYSKLTVDKSRWQQGNVFSC |
| | | | | SVMHEALHNHYTQKSLSLSPGK |
| 110. | MU 8-F11 CC x | artificial | aa | SHYWS |
| | I2C0-scFc VH | | | |
| | CDR1 | | | |
| 111. | MU 8-F11 CC x | artificial | aa | RIDVSGSANYNPALKS |
| | I2C0-scFc VH | | | |
| | CDR2 | | | |
| 112. | MU 8-F11 CC x | artificial | aa | APYSSGWGYFDY |
| | I2C0-scFc VH | | | |
| | CDR3 | | | |
| 113. | MU 8-F11 CC x | artificial | aa | SGDKLGDKYAS |
| | I2C0-scFc VL | | | |
| | CDR1 | | | |
| 114. | MU 8-F11 CC x | artificial | aa | HDNKRPS |
| | I2C0-scFc VL | | | |
| | CDR2 | | | |
| 115. | MU 8-F11 CC x | artificial | aa | QAWDITTAV |
| | I2C0-scFc VL | | | |
| | CDR3 | | | |
| 116. | MU 8-F11 CC x | artificial | aa | QVQLQESGPGLVKPSETLSLTCTVSGGSISSHYWSWI |
| | I2C0-scFc VH | | | RQSAGKCLEWIGRIDVSGSANYNPALKSRATMSADT |
| | | | | SKNQFSLRLSSVTAADTAVYYCARAPYSSGWGYFD |
| | | | | YWGQGTLVTVSS |
| 117. | MU 8-F11 CC x | artificial | aa | SYELTQPPSVSVSPGQTASITCSGDKLGDKYASWYQ |
| | I2C0-scFc VL | | | QQPGQSPVLVIYHDNKRPSGIPERFSGSNSGNTATLTI |
| | | | | SGTQAMDEADYFCQAWDITTAVFGCGTKLTVL |
| 118. | MU 8-F11 CC x | artificial | aa | QVQLQESGPGLVKPSETLSLTCTVSGGSISSHYWSWI |
| | I2C0-scFc scFv | | | RQSAGKCLEWIGRIDVSGSANYNPALKSRATMSADT |
| | | | | SKNQFSLRLSSVTAADTAVYYCARAPYSSGWGYFD |
| | | | | YWGQGTLVTVSSGGGGSGGGGSGGGGSSYELTQPP |
| | | | | SVSVSPGQTASITCSGDKLGDKYASWYQQQPGQSPV |
| | | | | LVIYHDNKRPSGIPERFSGSNSGNTATLTISGTQAMD |
| | | | | EADYFCQAWDITTAVFGCGTKLTVL |
| 119. | MU 8-F11 CC x | artificial | aa | QVQLQESGPGLVKPSETLSLTCTVSGGSISSHYWSWI |
| | I2C0-scFc | | | RQSAGKCLEWIGRIDVSGSANYNPALKSRATMSADT |
| | Bispecific molecule | | | SKNQFSLRLSSVTAADTAVYYCARAPYSSGWGYFD |
| | | | | YWGQGTLVTVSSGGGGSGGGGSGGGGSSYELTQPP |
| | | | | SVSVSPGQTASITCSGDKLGDKYASWYQQQPGQSPV |
| | | | | LVIYHDNKRPSGIPERFSGSNSGNTATLTISGTQAMD |
| | | | | EADYFCQAWDITTAVFGCGTKLTVLSGGGGSEVQL |
| | | | | VESGGGLVQPGGSLKLSCAASGFTFNKYAMNWVRQ |
| | | | | APGKGLEWVARIRSKYNNYATYYADSVKDRFTISR |
| | | | | DDSKNTAYLQMNNLKTEDTAVYYCVRHGNFGNSYI |
| | | | | SYWAYWGQGTLVTVSSGGGGSGGGGSGGGGSQTV |
| | | | | VTQEPSLTVSPGGTVTLTCGSSTGAVTSGNYPNWVQ |
| | | | | QKPGQAPRGLIGGTKFLAPGTPARFSGSLLGGKAAL |
| | | | | TLSGVQPEDEAEYYCVLWYSNRWVFGGGTKLTVL |
| 120. | MU 8-F11 CC x | artificial | aa | QVQLQESGPGLVKPSETLSLTCTVSGGSISSHYWSWI |
| | I2C0-scFc | | | RQSAGKCLEWIGRIDVSGSANYNPALKSRATMSADT |
| | Bispecific HLE | | | SKNQFSLRLSSVTAADTAVYYCARAPYSSGWGYFD |
| | molecule | | | YWGQGTLVTVSSGGGGSGGGGSGGGGSSYELTQPP |
| | | | | SVSVSPGQTASITCSGDKLGDKYASWYQQQPGQSPV |
| | | | | LVIYHDNKRPSGIPERFSGSNSGNTATLTISGTQAMD |
| | | | | EADYFCQAWDITTAVFGCGTKLTVLSGGGGSEVQL |
| | | | | VESGGGLVQPGGSLKLSCAASGFTFNKYAMNWVRQ |
| | | | | APGKGLEWVARIRSKYNNYATYYADSVKDRFTISR |
| | | | | DDSKNTAYLQMNNLKTEDTAVYYCVRHGNFGNSYI |
| | | | | SYWAYWGQGTLVTVSSGGGGSGGGGSGGGGSQTV |
| | | | | VTQEPSLTVSPGGTVTLTCGSSTGAVTSGNYPNWVQ |
| | | | | QKPGQAPRGLIGGTKFLAPGTPARFSGSLLGGKAAL |
| | | | | TLSGVQPEDEAEYYCVLWYSNRWVFGGGTKLTVLG |
| | | | | GGGDKTHTCPPCPAPELLGGPSVFLFPPKPKDTLMIS |
| | | | | RTPEVTCVVVDVSHEDPEVKFNWYVDGVEVHNAK |
| | | | | TKPCEEQYGSTYRCVSVLTVLHQDWLNGKEYKCKV |
| | | | | SNKALPAPIEKTISKAKGQPREPQVYTLPPSREEMTK |
| | | | | NQVSLTCLVKGFYPSDIAVEWESNGQPENNYKTTPP |
| | | | | VLDSDGSFFLYSKLTVDKSRWQQGNVFSCSVMHEA |
| | | | | LHNHYTQKSLSLSPGKGGGGSGGGGSGGGGSGGGG |
| | | | | SGGGGSGGGGSDKTHTCPPCPAPELLGGPSVFLFPPK |
| | | | | PKDTLMISRTPEVTCVVVDVSHEDPEVKFNWYVDG |
| | | | | VEVHNAKTKPCEEQYGSTYRCVSVLTVLHQDWLNG |
| | | | | KEYKCKVSNKALPAPIEKTISKAKGQPREPQVYTLPP |
| | | | | SREEMTKNQVSLTCLVKGFYPSDIAVEWESNGQPEN |
| | | | | NYKTTPPVLDSDGSFFLYSKLTVDKSRWQQGNVFSC |
| | | | | SVMHEALHNHYTQKSLSLSPGK |
| 121. | MU 8-F9 CC x | artificial | aa | GYYWS |
| | I2C0-scFc VH | | | |
| | CDR1 | | | |
| 122. | MU 8-F9 CC x | artificial | aa | DIDASGSTKYNPSLKS |
| | I2C0-scFc VH | | | |
| | CDR2 | | | |
| 123. | MU 8-F9 CC x | artificial | aa | KKYSTVWSYFDY |
| | I2C0-scFc VH | | | |
| | CDR3 | | | |
| 124. | MU 8-F9 CC x | artificial | aa | SGDKLGDKYAS |
| | I2C0-scFc VL | | | |
| | CDR1 | | | |
| 125. | MU 8-F9 CC x | artificial | aa | QDRKRPS |
| | I2C0-scFc VL | | | |
| | CDR2 | | | |
| 126. | MU 8-F9 CC x | artificial | aa | QAWGSSAAV |
| | I2C0-scFc VL | | | |
| | CDR3 | | | |
| 127. | MU 8-F9 CC x | artificial | aa | QVQLQQWGAGLLKPSETLSLTCAVYGGSFSGYYWS |
| | I2C0-scFc VH | | | WIRQPPGKCLEWIGDIDASGSTKYNPSLKSRVTISLD |
| | | | | TSKNQFSLKLNSVTAADTAVYFCARKKYSTVWSYF |
| | | | | DYWGQGTLVTVSS |
| 128. | MU 8-F9 CC x | artificial | aa | SYELTQPSSVSVSPGQTASITCSGDKLGDKYASWYQ |
| | I2C0-scFc VL | | | QKPGQSPVLVIYQDRKRPSGVPERFSGSNSGNTATLT |
| | | | | ISGTQAMDEADYYCQAWGSSAAVFGCGTKLTVL |
| 129. | MU 8-F9 CC x | artificial | aa | QVQLQQWGAGLLKPSETLSLTCAVYGGSFSGYYWS |
| | I2C0-scFc scFv | | | WIRQPPGKCLEWIGDIDASGSTKYNPSLKSRVTISLD |
| | | | | TSKNQFSLKLNSVTAADTAVYFCARKKYSTVWSYF |
| | | | | DYWGQGTLVTVSSGGGGSGGGGSGGGGSSYELTQP |
| | | | | SSVSVSPGQTASITCSGDKLGDKYASWYQQKPGQSP |
| | | | | VLVIYQDRKRPSGVPERFSGSNSGNTATLTISGTQAM |
| | | | | DEADYYCQAWGSSAAVFGCGTKLTVL |
| 130. | MU 8-F9 CC x | artificial | aa | QVQLQQWGAGLLKPSETLSLTCAVYGGSFSGYYWS |
| | I2C0-scFc | | | WIRQPPGKCLEWIGDIDASGSTKYNPSLKSRVTISLD |
| | Bispecific molecule | | | TSKNQFSLKLNSVTAADTAVYFCARKKYSTVWSYF |
| | | | | DYWGQGTLVTVSSGGGGSGGGGSGGGGSSYELTQP |
| | | | | SSVSVSPGQTASITCSGDKLGDKYASWYQQKPGQSP |
| | | | | VLVIYQDRKRPSGVPERFSGSNSGNTATLTISGTQAM |
| | | | | DEADYYCQAWGSSAAVFGCGTKLTVLSGGGGSEV |
| | | | | QLVESGGGLVQPGGSLKLSCAASGFTFNKYAMNWV |
| | | | | RQAPGKGLEWVARIRSKYNNYATYYADSVKDRFTI |
| | | | | SRDDSKNTAYLQMNNLKTEDTAVYYCVRHGNFGN |
| | | | | SYISYWAYWGQGTLVTVSSGGGGSGGGGSGGGGSQ |
| | | | | TVVTQEPSLTVSPGGTVTLTCGSSTGAVTSGNYPNW |
| | | | | VQQKPGQAPRGLIGGTKFLAPGTPARFSGSLLGGKA |
| | | | | ALTLSGVQPEDEAEYYCVLWYSNRWVFGGGTKLTV |
| | | | | L |
| 131. | MU 8-F9 CC x | artificial | aa | QVQLQQWGAGLLKPSETLSLTCAVYGGSFSGYYWS |
| | I2C0-scFc | | | WIRQPPGKCLEWIGDIDASGSTKYNPSLKSRVTISLD |
| | Bispecific HLE | | | TSKNQFSLKLNSVTAADTAVYFCARKKYSTVWSYF |
| | molecule | | | DYWGQGTLVTVSSGGGGSGGGGSGGGGSSYELTQP |
| | | | | SSVSVSPGQTASITCSGDKLGDKYASWYQQKPGQSP |
| | | | | VLVIYQDRKRPSGVPERFSGSNSGNTATLTISGTQAM |
| | | | | DEADYYCQAWGSSAAVFGCGTKLTVLSGGGGSEV |
| | | | | QLVESGGGLVQPGGSLKLSCAASGFTFNKYAMNWV |
| | | | | RQAPGKGLEWVARIRSKYNNYATYYADSVKDRFTI |
| | | | | SRDDSKNTAYLQMNNLKTEDTAVYYCVRHGNFGN |
| | | | | SYISYWAYWGQGTLVTVSSGGGGSGGGGSGGGGSQ |
| | | | | TVVTQEPSLTVSPGGTVTLTCGSSTGAVTSGNYPNW |
| | | | | VQQKPGQAPRGLIGGTKFLAPGTPARFSGSLLGGKA |
| | | | | ALTLSGVQPEDEAEYYCVLWYSNRWVFGGGTKLTV |
| | | | | LGGGGDKTHTCPPCPAPELLGGPSVFLFPPKPKDTL |
| | | | | MISRTPEVTCVVVDVSHEDPEVKFNWYVDGVEVHN |
| | | | | AKTKPCEEQYGSTYRCVSVLTVLHQDWLNGKEYKC |
| | | | | KVSNKALPAPIEKTISKAKGQPREPQVYTLPPSREEM |
| | | | | TKNQVSLTCLVKGFYPSDIAVEWESNGQPENNYKTT |
| | | | | PPVLDSDGSFFLYSKLTVDKSRWQQGNVFSCSVMH |
| | | | | EALHNHYTQKSLSLSPGKGGGGSGGGGSGGGGSGG |
| | | | | GGSGGGGSGGGGSDKTHTCPPCPAPELLGGPSVFLF |
| | | | | PPKPKDTLMISRTPEVTCVVVDVSHEDPEVKFNWYV |
| | | | | DGVEVHNAKTKPCEEQYGSTYRCVSVLTVLHQDWL |
| | | | | NGKEYKCKVSNKALPAPIEKTISKAKGQPREPQVYT |
| | | | | LPPSREEMTKNQVSLTCLVKGFYPSDIAVEWESNGQ |
| | | | | PENNYKTTPPVLDSDGSFFLYSKLTVDKSRWQQGN |
| | | | | VFSCSVMHEALHNHYTQKSLSLSPGK |
| 132. | MU 8-E3 CC X | artificial | aa | NHGMH |
| | I2C0-scFc VH | | | |
| | CDR1 | | | |
| 133. | MU 8-E3 CC X | artificial | aa | GIWSDASNKYYADAVKG |
| | I2C0-scFc VH | | | |
| | CDR2 | | | |
| 134. | MU 8-E3 CC X | artificial | aa | ATYTTGWSYFDY |
| | I2C0-scFc VH | | | |
| | CDR3 | | | |
| 135. | MU 8-E3 CC X | artificial | aa | SGDKLGDKYAS |
| | I2C0-scFc VL | | | |
| | CDR1 | | | |
| 136. | MU 8-E3 CC X | artificial | aa | QDNKRPS |
| | I2C0-scFc VL | | | |
| | CDR2 | | | |
| 137. | MU 8-E3 CC X | artificial | aa | QAYDASTWV |
| | I2C0-scFc VL | | | |
| | CDR3 | | | |
| 138. | MU 8-E3 CC X | artificial | aa | QVQLVESGGGVVQPGRSLRLACAASGFTFSNHGMH |
| | I2C0-scFc VH | | | WVRQAPGKCLEWVAGIWSDASNKYYADAVKGRFT |
| | | | | ISRDNSKNTLYLQMNSLRAEDTAVYYCARATYTTG |
| | | | | WSYFDYWGQGTLVTVSS |
| 139. | MU 8-E3 CC X | artificial | aa | SYELTQPASVSVSPGQTASITCSGDKLGDKYASWYQ |
| | I2C0-scFc VL | | | QKSGQSPVLVIYQDNKRPSGIPERFSGSNSGNTATLTI |
| | | | | SGTQAMDEADYYCQAYDASTWVFGCGTQLTVL |
| 140. | MU 8-E3 CC X | artificial | aa | QVQLVESGGGVVQPGRSLRLACAASGFTFSNHGMH |
| | I2C0-scFc scFv | | | WVRQAPGKCLEWVAGIWSDASNKYYADAVKGRFT |
| | | | | ISRDNSKNTLYLQMNSLRAEDTAVYYCARATYTTG |
| | | | | WSYFDYWGQGTLVTVSSGGGGSGGGGSGGGGSSY |
| | | | | ELTQPASVSVSPGQTASITCSGDKLGDKYASWYQQK |
| | | | | SGQSPVLVIYQDNKRPSGIPERFSGSNSGNTATLTISG |
| | | | | TQAMDEADYYCQAYDASTWVFGCGTQLTVL |
| 141. | MU 8-E3 CC X | artificial | aa | QVQLVESGGGVVQPGRSLRLACAASGFTFSNHGMH |
| | I2C0-scFc | | | WVRQAPGKCLEWVAGIWSDASNKYYADAVKGRFT |
| | Bispecific molecule | | | ISRDNSKNTLYLQMNSLRAEDTAVYYCARATYTTG |
| | | | | WSYFDYWGQGTLVTVSSGGGGSGGGGSGGGGSSY |
| | | | | ELTQPASVSVSPGQTASITCSGDKLGDKYASWYQQK |
| | | | | SGQSPVLVIYQDNKRPSGIPERFSGSNSGNTATLTISG |
| | | | | TQAMDEADYYCQAYDASTWVFGCGTQLTVLSGGG |
| | | | | GSEVQLVESGGGLVQPGGSLKLSCAASGFTFNKYA |
| | | | | MNWVRQAPGKGLEWVARIRSKYNNYATYYADSVK |
| | | | | DRFTISRDDSKNTAYLQMNNLKTEDTAVYYCVRHG |
| | | | | NFGNSYISYWAYWGQGTLVTVSSGGGGSGGGGSGG |
| | | | | GGSQTVVTQEPSLTVSPGGTVTLTCGSSTGAVTSGN |
| | | | | YPNWVQQKPGQAPRGLIGGTKFLAPGTPARFSGSLL |
| | | | | GGKAALTLSGVQPEDEAEYYCVLWYSNRWVFGGG |
| | | | | TKLTVL |
| 142. | MU 8-E3 CC X | artificial | aa | QVQLVESGGGVVQPGRSLRLACAASGFTFSNHGMH |
| | I2C0-scFc | | | WVRQAPGKCLEWVAGIWSDASNKYYADAVKGRFT |
| | Bispecific HLE | | | ISRDNSKNTLYLQMNSLRAEDTAVYYCARATYTTG |
| | molecule | | | WSYFDYWGQGTLVTVSSGGGGSGGGGSGGGGSSY |
| | | | | ELTQPASVSVSPGQTASITCSGDKLGDKYASWYQQK |
| | | | | SGQSPVLVIYQDNKRPSGIPERFSGSNSGNTATLTISG |
| | | | | TQAMDEADYYCQAYDASTWVFGCGTQLTVLSGGG |
| | | | | GSEVQLVESGGGLVQPGGSLKLSCAASGFTFNKYA |
| | | | | MNWVRQAPGKGLEWVARIRSKYNNYATYYADSVK |
| | | | | DRFTISRDDSKNTAYLQMNNLKTEDTAVYYCVRHG |
| | | | | NFGNSYISYWAYWGQGTLVTVSSGGGGSGGGGSGG |
| | | | | GGSQTVVTQEPSLTVSPGGTVTLTCGSSTGAVTSGN |
| | | | | YPNWVQQKPGQAPRGLIGGTKFLAPGTPARFSGSLL |
| | | | | GGKAALTLSGVQPEDEAEYYCVLWYSNRWVFGGG |
| | | | | TKLTVLGGGGDKTHTCPPCPAPELLGGPSVFLFPPKP |
| | | | | KDTLMISRTPEVTCVVVDVSHEDPEVKFNWYVDGV |
| | | | | EVHNAKTKPCEEQYGSTYRCVSVLTVLHQDWLNGK |
| | | | | EYKCKVSNKALPAPIEKTISKAKGQPREPQVYTLPPS |
| | | | | REEMTKNQVSLTCLVKGFYPSDIAVEWESNGQPEN |
| | | | | NYKTTPPVLDSDGSFFLYSKLTVDKSRWQQGNVFSC |
| | | | | SVMHEALHNHYTQKSLSLSPGKGGGGSGGGGSGGG |
| | | | | GSGGGGSGGGGSGGGGSDKTHTCPPCPAPELLGGPS |
| | | | | VFLFPPKPKDTLMISRTPEVTCVVVDVSHEDPEVKFN |
| | | | | WYVDGVEVHNAKTKPCEEQYGSTYRCVSVLTVLH |
| | | | | QDWLNGKEYKCKVSNKALPAPIEKTISKAKGQPREP |
| | | | | QVYTLPPSREEMTKNQVSLTCLVKGFYPSDIAVEWE |
| | | | | SNGQPENNYKTTPPVLDSDGSFFLYSKLTVDKSRWQ |
| | | | | QGNVFSCSVMHEALHNHYTQKSLSLSPGK |
| 143. | MU 8-D7 CC x | artificial | aa | GYYWS |
| | I2C0-scFc VH | | | |
| | CDR1 | | | |
| 144. | MU 8-D7 CC x | artificial | aa | DIDASGSTKYNPSLKS |
| | I2C0-scFc VH | | | |
| | CDR2 | | | |
| 145. | MU 8-D7 CC x | artificial | aa | KKYSTVWSYFDY |
| | I2C0-scFc VH | | | |
| | CDR3 | | | |
| 146. | MU 8-D7 CC x | artificial | aa | SGDKLGEKYAS |
| | I2C0-scFc VL | | | |
| | CDR1 | | | |
| 147. | MU 8-D7 CC x | artificial | aa | QDRKRPS |
| | I2C0-scFc VL | | | |
| | CDR2 | | | |
| 148. | MU 8-D7 CC x | artificial | aa | QAWGSSAAV |
| | I2C0-scFc VL | | | |
| | CDR3 | | | |
| 149. | MU 8-D7 CC x | artificial | aa | QVQLQQWGAGLLKPSETLSLTCAVYGGSFSGYYWS |
| | I2C0-scFc VH | | | WIRQPPGKCLEWIGDIDASGSTKYNPSLKSRVTISLD |
| | | | | TSKNQFSLKLNSVTAADTAVYFCARKKYSTVWSYF |
| | | | | DYWRQGTLVTVSS |
| 150. | MU 8-D7 CC x | artificial | aa | SYELTQPSSVSVPPGQTASITCSGDKLGEKYASWYQ |
| | I2C0-scFc VL | | | QKPGQSPVLIIYQDRKRPSGVPERFSGSNSGNTATLTI |
| | | | | SGTQAMDEADYYCQAWGSSAAVFGCGTKLTVL |
| 151. | MU 8-D7 CC x | artificial | aa | QVQLQQWGAGLLKPSETLSLTCAVYGGSFSGYYWS |
| | I2C0-scFc scFv | | | WIRQPPGKCLEWIGDIDASGSTKYNPSLKSRVTISLD |
| | | | | TSKNQFSLKLNSVTAADTAVYFCARKKYSTVWSYF |
| | | | | DYWRQGTLVTVSSGGGGSGGGGSGGGGSSYELTQP |
| | | | | SSVSVPPGQTASITCSGDKLGEKYASWYQQKPGQSP |
| | | | | VLIIYQDRKRPSGVPERFSGSNSGNTATLTISGTQAM |
| | | | | DEADYYCQAWGSSAAVFGCGTKLTVLS |
| 152. | MU 8-D7 CC x | artificial | aa | QVQLQQWGAGLLKPSETLSLTCAVYGGSFSGYYWS |
| | I2C0-scFc | | | WIRQPPGKCLEWIGDIDASGSTKYNPSLKSRVTISLD |
| | Bispecific molecule | | | TSKNQFSLKLNSVTAADTAVYFCARKKYSTVWSYF |
| | | | | DYWRQGTLVTVSSGGGGSGGGGSGGGGSSYELTQP |
| | | | | SSVSVPPGQTASITCSGDKLGEKYASWYQQKPGQSP |
| | | | | VLIIYQDRKRPSGVPERFSGSNSGNTATLTISGTQAM |
| | | | | DEADYYCQAWGSSAAVFGCGTKLTVLSGGGGSEV |
| | | | | QLVESGGGLVQPGGSLKLSCAASGFTFNKYAMNWV |
| | | | | RQAPGKGLEWVARIRSKYNNYATYYADSVKDRFTI |
| | | | | SRDDSKNTAYLQMNNLKTEDTAVYYCVRHGNFGN |
| | | | | SYISYWAYWGQGTLVTVSSGGGGSGGGGSGGGGSQ |
| | | | | TVVTQEPSLTVSPGGTVTLTCGSSTGAVTSGNYPNW |
| | | | | VQQKPGQAPRGLIGGTKFLAPGTPARFSGSLLGGKA |
| | | | | ALTLSGVQPEDEAEYYCVLWYSNRWVFGGGTKLTV |
| | | | | L |
| 153. | MU 8-D7 CC x | artificial | aa | QVQLQQWGAGLLKPSETLSLTCAVYGGSFSGYYWS |
| | I2C0-scFc | | | WIRQPPGKCLEWIGDIDASGSTKYNPSLKSRVTISLD |
| | Bispecific HLE | | | TSKNQFSLKLNSVTAADTAVYFCARKKYSTVWSYF |
| | molecule | | | DYWRQGTLVTVSSGGGGSGGGGSGGGGSSYELTQP |
| | | | | SSVSVPPGQTASITCSGDKLGEKYASWYQQKPGQSP |
| | | | | VLIIYQDRKRPSGVPERFSGSNSGNTATLTISGTQAM |
| | | | | DEADYYCQAWGSSAAVFGCGTKLTVLSGGGGSEV |
| | | | | QLVESGGGLVQPGGSLKLSCAASGFTFNKYAMNWV |
| | | | | RQAPGKGLEWVARIRSKYNNYATYYADSVKDRFTI |
| | | | | SRDDSKNTAYLQMNNLKTEDTAVYYCVRHGNFGN |
| | | | | SYISYWAYWGQGTLVTVSSGGGGSGGGGSGGGGSQ |
| | | | | TVVTQEPSLTVSPGGTVTLTCGSSTGAVTSGNYPNW |
| | | | | VQQKPGQAPRGLIGGTKFLAPGTPARFSGSLLGGKA |
| | | | | ALTLSGVQPEDEAEYYCVLWYSNRWVFGGGTKLTV |
| | | | | LGGGGDKTHTCPPCPAPELLGGPSVFLFPPKPKDTL |
| | | | | MISRTPEVTCVVVDVSHEDPEVKFNWYVDGVEVHN |
| | | | | AKTKPCEEQYGSTYRCVSVLTVLHQDWLNGKEYKC |
| | | | | KVSNKALPAPIEKTISKAKGQPREPQVYTLPPSREEM |
| | | | | TKNQVSLTCLVKGFYPSDIAVEWESNGQPENNYKTT |
| | | | | PPVLDSDGSFFLYSKLTVDKSRWQQGNVFSCSVMH |
| | | | | EALHNHYTQKSLSLSPGKGGGGSGGGGSGGGGSGG |
| | | | | GGSGGGGSGGGGSDKTHTCPPCPAPELLGGPSVFLF |
| | | | | PPKPKDTLMISRTPEVTCVVVDVSHEDPEVKFNWYV |
| | | | | DGVEVHNAKTKPCEEQYGSTYRCVSVLTVLHQDWL |
| | | | | NGKEYKCKVSNKALPAPIEKTISKAKGQPREPQVYT |
| | | | | LPPSREEMTKNQVSLTCLVKGFYPSDIAVEWESNGQ |
| | | | | PENNYKTTPPVLDSDGSFFLYSKLTVDKSRWQQGN |
| | | | | VFSCSVMHEALHNHYTQKSLSLSPGK |
| 154. | MU 8-C7 CC x | artificial | aa | GYYWS |
| | I2C0-scFc VH | | | |
| | CDR1 | | | |
| 155. | MU 8-C7 CC x | artificial | aa | DIDQSGSTKYNPSLKS |
| | I2C0-scFc VH | | | |
| | CDR2 | | | |
| 156. | MU 8-C7 CC x | artificial | aa | KKYSTVWSYFDY |
| | I2C0-scFc VH | | | |
| | CDR3 | | | |
| 157. | MU 8-C7 CC x | artificial | aa | SGDKLGDKYAS |
| | I2C0-scFc VL | | | |
| | CDR1 | | | |
| 158. | MU 8-C7 CC x | artificial | aa | QDRKRPS |
| | I2C0-scFc VL | | | |
| | CDR2 | | | |
| 159. | MU 8-C7 CC x | artificial | aa | QAWGSSAAV |
| | I2C0-scFc VL | | | |
| | CDR3 | | | |
| 160. | MU 8-C7 CC x | artificial | aa | QVQLQQWGAGLLKPSETLSLTCAVYGGSFSGYYWS |
| | I2C0-scFc VH | | | WIRQPPGKCLEWIGDIDQSGSTKYNPSLKSRVTISLD |
| | | | | TSKNQFSLKLNSVTAADTAVYFCARKKYSTVWSYF |
| | | | | DYWRQGTLVTVSS |
| 161. | MU 8-C7 CC x | artificial | aa | SYELTQPSSVSVSPGQTASITCSGDKLGDKYASWYQ |
| | I2C0-scFc VL | | | QKPGQSPVLIIYQDRKRPSGVPERFSGSNSGNTATLTI |
| | | | | SGTQAMDEADYYCQAWGSSAAVFGCGTKLTVL |
| 162. | MU 8-C7 CC x | artificial | aa | QVQLQQWGAGLLKPSETLSLTCAVYGGSFSGYYWS |
| | I2C0-scFc scFv | | | WIRQPPGKCLEWIGDIDQSGSTKYNPSLKSRVTISLD |
| | | | | TSKNQFSLKLNSVTAADTAVYFCARKKYSTVWSYF |
| | | | | DYWRQGTLVTVSSGGGGSGGGGSGGGGSSYELTQP |
| | | | | SSVSVSPGQTASITCSGDKLGDKYASWYQQKPGQSP |
| | | | | VLIIYQDRKRPSGVPERFSGSNSGNTATLTISGTQAM |
| | | | | DEADYYCQAWGSSAAVFGCGTKLTVL |
| 163. | MU 8-C7 CC x | artificial | aa | QVQLQQWGAGLLKPSETLSLTCAVYGGSFSGYYWS |
| | I2C0-scFc | | | WIRQPPGKCLEWIGDIDQSGSTKYNPSLKSRVTISLD |
| | Bispecific molecule | | | TSKNQFSLKLNSVTAADTAVYFCARKKYSTVWSYF |
| | | | | DYWRQGTLVTVSSGGGGSGGGGSGGGGSSYELTQP |
| | | | | SSVSVSPGQTASITCSGDKLGDKYASWYQQKPGQSP |
| | | | | VLIIYQDRKRPSGVPERFSGSNSGNTATLTISGTQAM |
| | | | | DEADYYCQAWGSSAAVFGCGTKLTVLSGGGGSEV |
| | | | | QLVESGGGLVQPGGSLKLSCAASGFTFNKYAMNWV |
| | | | | RQAPGKGLEWVARIRSKYNNYATYYADSVKDRFTI |
| | | | | SRDDSKNTAYLQMNNLKTEDTAVYYCVRHGNFGN |
| | | | | SYISYWAYWGQGTLVTVSSGGGGSGGGGSGGGGSQ |
| | | | | TVVTQEPSLTVSPGGTVTLTCGSSTGAVTSGNYPNW |
| | | | | VQQKPGQAPRGLIGGTKFLAPGTPARFSGSLLGGKA |
| | | | | ALTLSGVQPEDEAEYYCVLWYSNRWVFGGGTKLTV |
| | | | | L |
| 164. | MU 8-C7 CC x | artificial | aa | QVQLQQWGAGLLKPSETLSLTCAVYGGSFSGYYWS |
| | I2C0-scFc | | | WIRQPPGKCLEWIGDIDQSGSTKYNPSLKSRVTISLD |
| | Bispecific HLE | | | TSKNQFSLKLNSVTAADTAVYFCARKKYSTVWSYF |
| | molecule | | | DYWRQGTLVTVSSGGGGSGGGGSGGGGSSYELTQP |
| | | | | SSVSVSPGQTASITCSGDKLGDKYASWYQQKPGQSP |
| | | | | VLIIYQDRKRPSGVPERFSGSNSGNTATLTISGTQAM |
| | | | | DEADYYCQAWGSSAAVFGCGTKLTVLSGGGGSEV |
| | | | | QLVESGGGLVQPGGSLKLSCAASGFTFNKYAMNWV |
| | | | | RQAPGKGLEWVARIRSKYNNYATYYADSVKDRFTI |
| | | | | SRDDSKNTAYLQMNNLKTEDTAVYYCVRHGNFGN |
| | | | | SYISYWAYWGQGTLVTVSSGGGGSGGGGSGGGGSQ |
| | | | | TVVTQEPSLTVSPGGTVTLTCGSSTGAVTSGNYPNW |
| | | | | VQQKPGQAPRGLIGGTKFLAPGTPARFSGSLLGGKA |
| | | | | ALTLSGVQPEDEAEYYCVLWYSNRWVFGGGTKLTV |
| | | | | LGGGGDKTHTCPPCPAPELLGGPSVFLFPPKPKDTL |
| | | | | MISRTPEVTCVVVDVSHEDPEVKFNWYVDGVEVHN |
| | | | | AKTKPCEEQYGSTYRCVSVLTVLHQDWLNGKEYKC |
| | | | | KVSNKALPAPIEKTISKAKGQPREPQVYTLPPSREEM |
| | | | | TKNQVSLTCLVKGFYPSDIAVEWESNGQPENNYKTT |
| | | | | PPVLDSDGSFFLYSKLTVDKSRWQQGNVFSCSVMH |
| | | | | EALHNHYTQKSLSLSPGKGGGGSGGGGSGGGGSGG |
| | | | | GGSGGGGSGGGGSDKTHTCPPCPAPELLGGPSVFLF |
| | | | | PPKPKDTLMISRTPEVTCVVVDVSHEDPEVKFNWYV |
| | | | | DGVEVHNAKTKPCEEQYGSTYRCVSVLTVLHQDWL |
| | | | | NGKEYKCKVSNKALPAPIEKTISKAKGQPREPQVYT |
| | | | | LPPSREEMTKNQVSLTCLVKGFYPSDIAVEWESNGQ |
| | | | | PENNYKTTPPVLDSDGSFFLYSKLTVDKSRWQQGN |
| | | | | VFSCSVMHEALHNHYTQKSLSLSPGK |
| 165. | MU 8-B8 CC x | artificial | aa | GYYWS |
| | I2C0-scFc VH | | | |
| | CDR1 | | | |
| 166. | MU 8-B8 CC x | artificial | aa | DIDQSGSTKYNPSLKS |
| | I2C0-scFc VH | | | |
| | CDR2 | | | |
| 167. | MU 8-B8 CC x | artificial | aa | KKYSTVWSYFDY |
| | I2C0-scFc VH | | | |
| | CDR3 | | | |
| 168. | MU 8-B8 CC x | artificial | aa | SGDKLGDKYAS |
| | I2C0-scFc VL | | | |
| | CDR1 | | | |
| 169. | MU 8-B8 CC x | artificial | aa | QDRKRPS |
| | I2C0-scFc VL | | | |
| | CDR2 | | | |
| 170. | MU 8-B8 CC x | artificial | aa | QAWGSSAAV |
| | I2C0-scFc VL | | | |
| | CDR3 | | | |
| 171. | MU 8-B8 CC x | artificial | aa | QVQLQQWGAGLLKPSETLSLTCAVYGGSFSGYYWS |
| | I2C0-scFc VH | | | WIRQPPGKCLEWIGDIDQSGSTKYNPSLKSRVTISLD |
| | | | | TSKNQFSLKLNSVTAADTAVYFCARKKYSTVWSYF |
| | | | | DYWGQGTLVTVSS |
| 172. | MU 8-B8 CC x | artificial | aa | SYELTQPPSVSVPPGQTASITCSGDKLGDKYASWYQ |
| | I2C0-scFc VL | | | QKPGQSPVLIIYQDRKRPSGVPERFSGSNSGNTATLTI |
| | | | | SGTQAMDEADYYCQAWGSSAAVFGCGTKLTVL |
| 173. | MU 8-B8 CC x | artificial | aa | QVQLQQWGAGLLKPSETLSLTCAVYGGSFSGYYWS |
| | I2C0-scFc scFv | | | WIRQPPGKCLEWIGDIDQSGSTKYNPSLKSRVTISLD |
| | | | | TSKNQFSLKLNSVTAADTAVYFCARKKYSTVWSYF |
| | | | | DYWGQGTLVTVSSGGGGSGGGGSGGGGSSYELTQP |
| | | | | PSVSVPPGQTASITCSGDKLGDKYASWYQQKPGQSP |
| | | | | VLIIYQDRKRPSGVPERFSGSNSGNTATLTISGTQAM |
| | | | | DEADYYCQAWGSSAAVFGCGTKLTVL |
| 174. | MU 8-B8 CC x | artificial | aa | QVQLQQWGAGLLKPSETLSLTCAVYGGSFSGYYWS |
| | I2C0-scFc | | | WIRQPPGKCLEWIGDIDQSGSTKYNPSLKSRVTISLD |
| | Bispecific molecule | | | TSKNQFSLKLNSVTAADTAVYFCARKKYSTVWSYF |
| | | | | DYWGQGTLVTVSSGGGGSGGGGSGGGGSSYELTQP |
| | | | | PSVSVPPGQTASITCSGDKLGDKYASWYQQKPGQSP |
| | | | | VLIIYQDRKRPSGVPERFSGSNSGNTATLTISGTQAM |
| | | | | DEADYYCQAWGSSAAVFGCGTKLTVLSGGGGSEV |
| | | | | QLVESGGGLVQPGGSLKLSCAASGFTFNKYAMNWV |
| | | | | RQAPGKGLEWVARIRSKYNNYATYYADSVKDRFTI |
| | | | | SRDDSKNTAYLQMNNLKTEDTAVYYCVRHGNFGN |
| | | | | SYISYWAYWGQGTLVTVSSGGGGSGGGGSGGGGSQ |
| | | | | TVVTQEPSLTVSPGGTVTLTCGSSTGAVTSGNYPNW |
| | | | | VQQKPGQAPRGLIGGTKFLAPGTPARFSGSLLGGKA |
| | | | | ALTLSGVQPEDEAEYYCVLWYSNRWVFGGGTKLTV |
| | | | | L |
| 175. | MU 8-B8 CC x | artificial | aa | QVQLQQWGAGLLKPSETLSLTCAVYGGSFSGYYWS |
| | I2C0-scFc | | | WIRQPPGKCLEWIGDIDQSGSTKYNPSLKSRVTISLD |
| | Bispecific HLE | | | TSKNQFSLKLNSVTAADTAVYFCARKKYSTVWSYF |
| | molecule | | | DYWGQGTLVTVSSGGGGSGGGGSGGGGSSYELTQP |
| | | | | PSVSVPPGQTASITCSGDKLGDKYASWYQQKPGQSP |
| | | | | VLIIYQDRKRPSGVPERFSGSNSGNTATLTISGTQAM |
| | | | | DEADYYCQAWGSSAAVFGCGTKLTVLSGGGGSEV |
| | | | | QLVESGGGLVQPGGSLKLSCAASGFTFNKYAMNWV |
| | | | | RQAPGKGLEWVARIRSKYNNYATYYADSVKDRFTI |
| | | | | SRDDSKNTAYLQMNNLKTEDTAVYYCVRHGNFGN |
| | | | | SYISYWAYWGQGTLVTVSSGGGGSGGGGSGGGGSQ |
| | | | | TVVTQEPSLTVSPGGTVTLTCGSSTGAVTSGNYPNW |
| | | | | VQQKPGQAPRGLIGGTKFLAPGTPARFSGSLLGGKA |
| | | | | ALTLSGVQPEDEAEYYCVLWYSNRWVFGGGTKLTV |
| | | | | LGGGGDKTHTCPPCPAPELLGGPSVFLFPPKPKDTL |
| | | | | MISRTPEVTCVVVDVSHEDPEVKFNWYVDGVEVHN |
| | | | | AKTKPCEEQYGSTYRCVSVLTVLHQDWLNGKEYKC |
| | | | | KVSNKALPAPIEKTISKAKGQPREPQVYTLPPSREEM |
| | | | | TKNQVSLTCLVKGFYPSDIAVEWESNGQPENNYKTT |
| | | | | PPVLDSDGSFFLYSKLTVDKSRWQQGNVFSCSVMH |
| | | | | EALHNHYTQKSLSLSPGKGGGGSGGGGSGGGGSGG |
| | | | | GGSGGGGSGGGGSDKTHTCPPCPAPELLGGPSVFLF |
| | | | | PPKPKDTLMISRTPEVTCVVVDVSHEDPEVKFNWYV |
| | | | | DGVEVHNAKTKPCEEQYGSTYRCVSVLTVLHQDWL |
| | | | | NGKEYKCKVSNKALPAPIEKTISKAKGQPREPQVYT |
| | | | | LPPSREEMTKNQVSLTCLVKGFYPSDIAVEWESNGQ |
| | | | | PENNYKTTPPVLDSDGSFFLYSKLTVDKSRWQQGN |
| | | | | VFSCSVMHEALHNHYTQKSLSLSPGK |
| 176. | MU 8-B7 CC x | artificial | aa | GYYWS |
| | I2C0-scFc VH | | | |
| | CDR1 | | | |
| 177. | MU 8-B7 CC x | artificial | aa | DIDASGSTKYNPSLKS |
| | I2C0-scFc VH | | | |
| | CDR2 | | | |
| 178. | MU 8-B7 CC x | artificial | aa | KKYSTVWSYFDN |
| | I2C0-scFc VH | | | |
| | CDR3 | | | |
| 179. | MU 8-B7 CC x | artificial | aa | SGDKLGDKYAS |
| | I2C0-scFc VL | | | |
| | CDR1 | | | |
| 180. | MU 8-B7 CC x | artificial | aa | QDRKRPS |
| | I2C0-scFc VL | | | |
| | CDR2 | | | |
| 181. | MU 8-B7 CC x | artificial | aa | QAWGSSTAV |
| | I2C0-scFc VL | | | |
| | CDR3 | | | |
| 182. | MU 8-B7 CC x | artificial | aa | QVQLQQWGAGLLKPSETLSLTCAVYGGSFSGYYWS |
| | I2C0-scFc VH | | | WIRQPPGKCLEWIGDIDASGSTKYNPSLKSRVTISLD |
| | | | | TSKNQFSLKLNSVTAADTAVYFCARKKYSTVWSYF |
| | | | | DNWGQGTLVTVSS |
| 183. | MU 8-B7 CC x | artificial | aa | SYELTQPSSVSVPPGQTASITCSGDKLGDKYASWYQ |
| | I2C0-scFc VL | | | QKPGQSPVLVIYQDRKRPSGVPERFSGSNSGNTATLT |
| | | | | ISGTQAMDEADYYCQAWGSSTAVFGCGTKLTVL |
| 184. | MU 8-B7 CC x | artificial | aa | QVQLQQWGAGLLKPSETLSLTCAVYGGSFSGYYWS |
| | I2C0-scFc scFv | | | WIRQPPGKCLEWIGDIDASGSTKYNPSLKSRVTISLD |
| | | | | TSKNQFSLKLNSVTAADTAVYFCARKKYSTVWSYF |
| | | | | DNWGQGTLVTVSSGGGGSGGGGSGGGGSSYELTQP |
| | | | | SSVSVPPGQTASITCSGDKLGDKYASWYQQKPGQSP |
| | | | | VLVIYQDRKRPSGVPERFSGSNSGNTATLTISGTQAM |
| | | | | DEADYYCQAWGSSTAVFGCGTKLTVL |
| 185. | MU 8-B7 CC x | artificial | aa | QVQLQQWGAGLLKPSETLSLTCAVYGGSFSGYYWS |
| | I2C0-scFc | | | WIRQPPGKCLEWIGDIDASGSTKYNPSLKSRVTISLD |
| | Bispecific molecule | | | TSKNQFSLKLNSVTAADTAVYFCARKKYSTVWSYF |
| | | | | DNWGQGTLVTVSSGGGGSGGGGSGGGGSSYELTQP |
| | | | | SSVSVPPGQTASITCSGDKLGDKYASWYQQKPGQSP |
| | | | | VLVIYQDRKRPSGVPERFSGSNSGNTATLTISGTQAM |
| | | | | DEADYYCQAWGSSTAVFGCGTKLTVLSGGGGSEVQ |
| | | | | LVESGGGLVQPGGSLKLSCAASGFTFNKYAMNWVR |
| | | | | QAPGKGLEWVARIRSKYNNYATYYADSVKDRFTIS |
| | | | | RDDSKNTAYLQMNNLKTEDTAVYYCVRHGNFGNS |
| | | | | YISYWAYWGQGTLVTVSSGGGGSGGGGSGGGGSQ |
| | | | | TVVTQEPSLTVSPGGTVTLTCGSSTGAVTSGNYPNW |
| | | | | VQQKPGQAPRGLIGGTKFLAPGTPARFSGSLLGGKA |
| | | | | ALTLSGVQPEDEAEYYCVLWYSNRWVFGGGTKLTV |
| | | | | L |
| 186. | MU 8-B7 CC x | artificial | aa | QVQLQQWGAGLLKPSETLSLTCAVYGGSFSGYYWS |
| | I2C0-scFc | | | WIRQPPGKCLEWIGDIDASGSTKYNPSLKSRVTISLD |
| | Bispecific HLE | | | TSKNQFSLKLNSVTAADTAVYFCARKKYSTVWSYF |
| | molecule | | | DNWGQGTLVTVSSGGGGSGGGGSGGGGSSYELTQP |
| | | | | SSVSVPPGQTASITCSGDKLGDKYASWYQQKPGQSP |
| | | | | VLVIYQDRKRPSGVPERFSGSNSGNTATLTISGTQAM |
| | | | | DEADYYCQAWGSSTAVFGCGTKLTVLSGGGGSEVQ |
| | | | | LVESGGGLVQPGGSLKLSCAASGFTFNKYAMNWVR |
| | | | | QAPGKGLEWVARIRSKYNNYATYYADSVKDRFTIS |
| | | | | RDDSKNTAYLQMNNLKTEDTAVYYCVRHGNFGNS |
| | | | | YISYWAYWGQGTLVTVSSGGGGSGGGGSGGGGSQ |
| | | | | TVVTQEPSLTVSPGGTVTLTCGSSTGAVTSGNYPNW |
| | | | | VQQKPGQAPRGLIGGTKFLAPGTPARFSGSLLGGKA |
| | | | | ALTLSGVQPEDEAEYYCVLWYSNRWVFGGGTKLTV |
| | | | | LGGGGDKTHTCPPCPAPELLGGPSVFLFPPKPKDTL |
| | | | | MISRTPEVTCVVVDVSHEDPEVKFNWYVDGVEVHN |
| | | | | AKTKPCEEQYGSTYRCVSVLTVLHQDWLNGKEYKC |
| | | | | KVSNKALPAPIEKTISKAKGQPREPQVYTLPPSREEM |
| | | | | TKNQVSLTCLVKGFYPSDIAVEWESNGQPENNYKTT |
| | | | | PPVLDSDGSFFLYSKLTVDKSRWQQGNVFSCSVMH |
| | | | | EALHNHYTQKSLSLSPGKGGGGSGGGGSGGGGSGG |
| | | | | GGSGGGGSGGGGSDKTHTCPPCPAPELLGGPSVFLF |
| | | | | PPKPKDTLMISRTPEVTCVVVDVSHEDPEVKFNWYV |
| | | | | DGVEVHNAKTKPCEEQYGSTYRCVSVLTVLHQDWL |
| | | | | NGKEYKCKVSNKALPAPIEKTISKAKGQPREPQVYT |
| | | | | LPPSREEMTKNQVSLTCLVKGFYPSDIAVEWESNGQ |
| | | | | PENNYKTTPPVLDSDGSFFLYSKLTVDKSRWQQGN |
| | | | | VFSCSVMHEALHNHYTQKSLSLSPGK |
| 187. | MU 8-A7 CC x | artificial | aa | GYYWS |
| | I2C0-scFc VH | | | |
| | CDR1 | | | |
| 188. | MU 8-A7 CC x | artificial | aa | DIDQSGSTKYNPSLKS |
| | I2C0-scFc VH | | | |
| | CDR2 | | | |
| 189. | MU 8-A7 CC x | artificial | aa | KKYSTVWSYFDY |
| | I2C0-scFc VH | | | |
| | CDR3 | | | |
| 190. | MU 8-A7 CC x | artificial | aa | SGDKLGDKYAS |
| | I2C0-scFc VL | | | |
| | CDR1 | | | |
| 191. | MU 8-A7 CC x | artificial | aa | QDRKRPS |
| | I2C0-scFc VL | | | |
| | CDR2 | | | |
| 192. | MU 8-A7 CC x | artificial | aa | QAWGSSTAV |
| | I2C0-scFc VL | | | |
| | CDR3 | | | |
| 193. | MU 8-A7 CC x | artificial | aa | QVQLQQWGAGLLKPSETLSLTCAVYGGSFSGYYWS |
| | I2C0-scFc VH | | | WIRQPPGKCLEWIGDIDQSGSTKYNPSLKSRVTISLD |
| | | | | TSKNQFSLKLNSVTAADTAVYFCARKKYSTVWSYF |
| | | | | DYWGQGTLVTVSS |
| 194. | MU 8-A7 CC x | artificial | aa | SYELTQPSSVSVPPGQTASITCSGDKLGDKYASWYQ |
| | I2C0-scFc VL | | | QKPGQSPVLVIYQDRKRPSGVPERFSGSNSGNTATLT |
| | | | | ISGTQAMDEADYYCQAWGSSTAVFGCGTKLTVL |
| 195. | MU 8-A7 CC x | artificial | aa | QVQLQQWGAGLLKPSETLSLTCAVYGGSFSGYYWS |
| | I2C0-scFc scFv | | | WIRQPPGKCLEWIGDIDQSGSTKYNPSLKSRVTISLD |
| | | | | TSKNQFSLKLNSVTAADTAVYFCARKKYSTVWSYF |
| | | | | DYWGQGTLVTVSSGGGGSGGGGSGGGGSSYELTQP |
| | | | | SSVSVPPGQTASITCSGDKLGDKYASWYQQKPGQSP |
| | | | | VLVIYQDRKRPSGVPERFSGSNSGNTATLTISGTQAM |
| | | | | DEADYYCQAWGSSTAVFGCGTKLTVL |
| 196. | MU 8-A7 CC x | artificial | aa | QVQLQQWGAGLLKPSETLSLTCAVYGGSFSGYYWS |
| | I2C0-scFc | | | WIRQPPGKCLEWIGDIDQSGSTKYNPSLKSRVTISLD |
| | Bispecific molecule | | | TSKNQFSLKLNSVTAADTAVYFCARKKYSTVWSYF |
| | | | | DYWGQGTLVTVSSGGGGSGGGGSGGGGSSYELTQP |
| | | | | SSVSVPPGQTASITCSGDKLGDKYASWYQQKPGQSP |
| | | | | VLVIYQDRKRPSGVPERFSGSNSGNTATLTISGTQAM |
| | | | | DEADYYCQAWGSSTAVFGCGTKLTVLSGGGGSEVQ |
| | | | | LVESGGGLVQPGGSLKLSCAASGFTFNKYAMNWVR |
| | | | | QAPGKGLEWVARIRSKYNNYATYYADSVKDRFTIS |
| | | | | RDDSKNTAYLQMNNLKTEDTAVYYCVRHGNFGNS |
| | | | | YISYWAYWGQGTLVTVSSGGGGSGGGGSGGGGSQ |
| | | | | TVVTQEPSLTVSPGGTVTLTCGSSTGAVTSGNYPNW |
| | | | | VQQKPGQAPRGLIGGTKFLAPGTPARFSGSLLGGKA |
| | | | | ALTLSGVQPEDEAEYYCVLWYSNRWVFGGGTKLTV |
| | | | | L |
| 197. | MU 8-A7 CC x | artificial | aa | QVQLQQWGAGLLKPSETLSLTCAVYGGSFSGYYWS |
| | I2C0-scFc | | | WIRQPPGKCLEWIGDIDQSGSTKYNPSLKSRVTISLD |
| | Bispecific HLE | | | TSKNQFSLKLNSVTAADTAVYFCARKKYSTVWSYF |
| | molecule | | | DYWGQGTLVTVSSGGGGSGGGGSGGGGSSYELTQP |
| | | | | SSVSVPPGQTASITCSGDKLGDKYASWYQQKPGQSP |
| | | | | VLVIYQDRKRPSGVPERFSGSNSGNTATLTISGTQAM |
| | | | | DEADYYCQAWGSSTAVFGCGTKLTVLSGGGGSEVQ |
| | | | | LVESGGGLVQPGGSLKLSCAASGFTFNKYAMNWVR |
| | | | | QAPGKGLEWVARIRSKYNNYATYYADSVKDRFTIS |
| | | | | RDDSKNTAYLQMNNLKTEDTAVYYCVRHGNFGNS |
| | | | | YISYWAYWGQGTLVTVSSGGGGSGGGGSGGGGSQ |
| | | | | TVVTQEPSLTVSPGGTVTLTCGSSTGAVTSGNYPNW |
| | | | | VQQKPGQAPRGLIGGTKFLAPGTPARFSGSLLGGKA |
| | | | | ALTLSGVQPEDEAEYYCVLWYSNRWVFGGGTKLTV |
| | | | | LGGGGDKTHTCPPCPAPELLGGPSVFLFPPKPKDTL |
| | | | | MISRTPEVTCVVVDVSHEDPEVKFNWYVDGVEVHN |
| | | | | AKTKPCEEQYGSTYRCVSVLTVLHQDWLNGKEYKC |
| | | | | KVSNKALPAPIEKTISKAKGQPREPQVYTLPPSREEM |
| | | | | TKNQVSLTCLVKGFYPSDIAVEWESNGQPENNYKTT |
| | | | | PPVLDSDGSFFLYSKLTVDKSRWQQGNVFSCSVMH |
| | | | | EALHNHYTQKSLSLSPGKGGGGSGGGGSGGGGSGG |
| | | | | GGSGGGGSGGGGSDKTHTCPPCPAPELLGGPSVFLF |
| | | | | PPKPKDTLMISRTPEVTCVVVDVSHEDPEVKFNWYV |
| | | | | DGVEVHNAKTKPCEEQYGSTYRCVSVLTVLHQDWL |
| | | | | NGKEYKCKVSNKALPAPIEKTISKAKGQPREPQVYT |
| | | | | LPPSREEMTKNQVSLTCLVKGFYPSDIAVEWESNGQ |
| | | | | PENNYKTTPPVLDSDGSFFLYSKLTVDKSRWQQGN |
| | | | | VFSCSVMHEALHNHYTQKSLSLSPGK |
| 198. | MU 7-G6 CC x | artificial | aa | SYGMH |
| | I2C0-scFc VH | | | |
| | CDR1 | | | |
| 199. | MU 7-G6 CC x | artificial | aa | VIWYSGSNKYYATSVKG |
| | I2C0-scFc VH | | | |
| | CDR2 | | | |
| 200. | MU 7-G6 CC x | artificial | aa | GAYTYGFDY |
| | I2C0-scFc VH | | | |
| | CDR3 | | | |
| 201. | MU 7-G6 CC x | artificial | aa | RASQSINRYLA |
| | I2C0-scFc VL | | | |
| | CDR1 | | | |
| 202. | MU 7-G6 CC x | artificial | aa | TASNRAT |
| | I2C0-scFc VL | | | |
| | CDR2 | | | |
| 203. | MU 7-G6 CC x | artificial | aa | HHYGSSIFT |
| | I2C0-scFc VL | | | |
| | CDR3 | | | |
| 204. | MU 7-G6 CC x | artificial | aa | QVQLVESGGGVVKPGGSLRLSCAASGFTFSSYGMH |
| | I2C0-scFc VH | | | WVRQAPGKCLEWVAVIWYSGSNKYYATSVKGRFTI |
| | | | | SRDNSKNTLYLQMNNLRAEDTAVYYCARGAYTYG |
| | | | | FDYWGQGTLVTVSS |
| 205. | MU 7-G6 CC x | artificial | aa | EIVLTQSPGTLSLSPGERATLSCRASQSINRYLAWYQ |
| | I2C0-scFc VL | | | QKPGQAPRLLIYTASNRATGIPDRFSGSGSGTDFTLTI |
| | | | | SRLEPEDFAVYYCHHYGSSIFTFGCGTKVEIK |
| 206. | MU 7-G6 CC x | artificial | aa | QVQLVESGGGVVKPGGSLRLSCAASGFTFSSYGMH |
| | I2C0-scFc scFv | | | WVRQAPGKCLEWVAVIWYSGSNKYYATSVKGRFTI |
| | | | | SRDNSKNTLYLQMNNLRAEDTAVYYCARGAYTYG |
| | | | | FDYWGQGTLVTVSSGGGGSGGGGSGGGGSEIVLTQ |
| | | | | SPGTLSLSPGERATLSCRASQSINRYLAWYQQKPGQ |
| | | | | APRLLIYTASNRATGIPDRFSGSGSGTDFTLTISRLEP |
| | | | | EDFAVYYCHHYGSSIFTFGCGTKVEIK |
| 207. | MU 7-G6 CC x | artificial | aa | QVQLVESGGGVVKPGGSLRLSCAASGFTFSSYGMH |
| | I2C0-scFc | | | WVRQAPGKCLEWVAVIWYSGSNKYYATSVKGRFTI |
| | Bispecific molecule | | | SRDNSKNTLYLQMNNLRAEDTAVYYCARGAYTYG |
| | | | | FDYWGQGTLVTVSSGGGGSGGGGSGGGGSEIVLTQ |
| | | | | SPGTLSLSPGERATLSCRASQSINRYLAWYQQKPGQ |
| | | | | APRLLIYTASNRATGIPDRFSGSGSGTDFTLTISRLEP |
| | | | | EDFAVYYCHHYGSSIFTFGCGTKVEIKSGGGGSEVQ |
| | | | | LVESGGGLVQPGGSLKLSCAASGFTFNKYAMNWVR |
| | | | | QAPGKGLEWVARIRSKYNNYATYYADSVKDRFTIS |
| | | | | RDDSKNTAYLQMNNLKTEDTAVYYCVRHGNFGNS |
| | | | | YISYWAYWGQGTLVTVSSGGGGSGGGGSGGGGSQ |
| | | | | TVVTQEPSLTVSPGGTVTLTCGSSTGAVTSGNYPNW |
| | | | | VQQKPGQAPRGLIGGTKFLAPGTPARFSGSLLGGKA |
| | | | | ALTLSGVQPEDEAEYYCVLWYSNRWVFGGGTKLTV |
| | | | | L |
| 208. | MU 7-G6 CC x | artificial | aa | QVQLVESGGGVVKPGGSLRLSCAASGFTFSSYGMH |
| | I2C0-scFc | | | WVRQAPGKCLEWVAVIWYSGSNKYYATSVKGRFTI |
| | Bispecific HLE | | | SRDNSKNTLYLQMNNLRAEDTAVYYCARGAYTYG |
| | molecule | | | FDYWGQGTLVTVSSGGGGSGGGGSGGGGSEIVLTQ |
| | | | | SPGTLSLSPGERATLSCRASQSINRYLAWYQQKPGQ |
| | | | | APRLLIYTASNRATGIPDRFSGSGSGTDFTLTISRLEP |
| | | | | EDFAVYYCHHYGSSIFTFGCGTKVEIKSGGGGSEVQ |
| | | | | LVESGGGLVQPGGSLKLSCAASGFTFNKYAMNWVR |
| | | | | QAPGKGLEWVARIRSKYNNYATYYADSVKDRFTIS |
| | | | | RDDSKNTAYLQMNNLKTEDTAVYYCVRHGNFGNS |
| | | | | YISYWAYWGQGTLVTVSSGGGGSGGGGSGGGGSQ |
| | | | | TVVTQEPSLTVSPGGTVTLTCGSSTGAVTSGNYPNW |
| | | | | VQQKPGQAPRGLIGGTKFLAPGTPARFSGSLLGGKA |
| | | | | ALTLSGVQPEDEAEYYCVLWYSNRWVFGGGTKLTV |
| | | | | LGGGGDKTHTCPPCPAPELLGGPSVFLFPPKPKDTL |
| | | | | MISRTPEVTCVVVDVSHEDPEVKFNWYVDGVEVHN |
| | | | | AKTKPCEEQYGSTYRCVSVLTVLHQDWLNGKEYKC |
| | | | | KVSNKALPAPIEKTISKAKGQPREPQVYTLPPSREEM |
| | | | | TKNQVSLTCLVKGFYPSDIAVEWESNGQPENNYKTT |
| | | | | PPVLDSDGSFFLYSKLTVDKSRWQQGNVFSCSVMH |
| | | | | EALHNHYTQKSLSLSPGKGGGGSGGGGSGGGGSGG |
| | | | | GGSGGGGSGGGGSDKTHTCPPCPAPELLGGPSVFLF |
| | | | | PPKPKDTLMISRTPEVTCVVVDVSHEDPEVKFNWYV |
| | | | | DGVEVHNAKTKPCEEQYGSTYRCVSVLTVLHQDWL |
| | | | | NGKEYKCKVSNKALPAPIEKTISKAKGQPREPQVYT |
| | | | | LPPSREEMTKNQVSLTCLVKGFYPSDIAVEWESNGQ |
| | | | | PENNYKTTPPVLDSDGSFFLYSKLTVDKSRWQQGN |
| | | | | VFSCSVMHEALHNHYTQKSLSLSPGK |
| 209. | MU 6-B12 CC x | artificial | aa | SYGMH |
| | I2C0-scFc VH | | | |
| | CDR1 | | | |
| 210. | MU 6-B12 CC x | artificial | aa | VIWFDASNKYYAESVKG |
| | I2C0-scFc VH | | | |
| | CDR2 | | | |
| 211. | MU 6-B12 CC x | artificial | aa | GAYTYGFDY |
| | I2C0-scFc VH | | | |
| | CDR3 | | | |
| 212. | MU 6-B12 CC x | artificial | aa | RASQSINRYLA |
| | I2C0-scFc VL | | | |
| | CDR1 | | | |
| 213. | MU 6-B12 CC x | artificial | aa | TASNRAT |
| | I2C0-scFc VL | | | |
| | CDR2 | | | |
| 214. | MU 6-B12 CC x | artificial | aa | HHYGSSIFT |
| | I2C0-scFc VL | | | |
| | CDR3 | | | |
| 215. | MU 6-B12 CC x | artificial | aa | QVQLVESGGGVVKPGRSLRLSCAASGFTFSSYGMH |
| | I2C0-scFc VH | | | WVRQAPGKCLEWVAVIWFDASNKYYAESVKGRFTI |
| | | | | SRDNSKNTLYLQMNNLRAEDTAVYYCARGAYTYG |
| | | | | FDYWGQGTLVTVSS |
| 216. | MU 6-B12 CC x | artificial | aa | EIVLTQSPGTLSLSPGERATLSCRASQSINRYLAWYQ |
| | I2C0-scFc VL | | | QKPGQAPRLLIYTASNRATGIPDRFSGSGSGTDFTLTI |
| | | | | SRLEPEDFAVYYCHHYGSSIFTFGCGTKVEIK |
| 217. | MU 6-B12 CC x | artificial | aa | QVQLVESGGGVVKPGRSLRLSCAASGFTFSSYGMH |
| | I2C0-scFc scFv | | | WVRQAPGKCLEWVAVIWFDASNKYYAESVKGRFTI |
| | | | | SRDNSKNTLYLQMNNLRAEDTAVYYCARGAYTYG |
| | | | | FDYWGQGTLVTVSSGGGGSGGGGSGGGGSEIVLTQ |
| | | | | SPGTLSLSPGERATLSCRASQSINRYLAWYQQKPGQ |
| | | | | APRLLIYTASNRATGIPDRFSGSGSGTDFTLTISRLEP |
| | | | | EDFAVYYCHHYGSSIFTFGCGTKVEIK |
| 218. | MU 6-B12 CC x | artificial | aa | QVQLVESGGGVVKPGRSLRLSCAASGFTFSSYGMH |
| | I2C0-scFc | | | WVRQAPGKCLEWVAVIWFDASNKYYAESVKGRFTI |
| | Bispecific molecule | | | SRDNSKNTLYLQMNNLRAEDTAVYYCARGAYTYG |
| | | | | FDYWGQGTLVTVSSGGGGSGGGGSGGGGSEIVLTQ |
| | | | | SPGTLSLSPGERATLSCRASQSINRYLAWYQQKPGQ |
| | | | | APRLLIYTASNRATGIPDRFSGSGSGTDFTLTISRLEP |
| | | | | EDFAVYYCHHYGSSIFTFGCGTKVEIKSGGGGSEVQ |
| | | | | LVESGGGLVQPGGSLKLSCAASGFTFNKYAMNWVR |
| | | | | QAPGKGLEWVARIRSKYNNYATYYADSVKDRFTIS |
| | | | | RDDSKNTAYLQMNNLKTEDTAVYYCVRHGNFGNS |
| | | | | YISYWAYWGQGTLVTVSSGGGGSGGGGSGGGGSQ |
| | | | | TVVTQEPSLTVSPGGTVTLTCGSSTGAVTSGNYPNW |
| | | | | VQQKPGQAPRGLIGGTKFLAPGTPARFSGSLLGGKA |
| | | | | ALTLSGVQPEDEAEYYCVLWYSNRWVFGGGTKLTV |
| | | | | L |
| 219. | MU 6-B12 CC x | artificial | aa | QVQLVESGGGVVKPGRSLRLSCAASGFTFSSYGMH |
| | I2C0-scFc | | | WVRQAPGKCLEWVAVIWFDASNKYYAESVKGRFTI |
| | Bispecific HLE | | | SRDNSKNTLYLQMNNLRAEDTAVYYCARGAYTYG |
| | molecule | | | FDYWGQGTLVTVSSGGGGSGGGGSGGGGSEIVLTQ |
| | | | | SPGTLSLSPGERATLSCRASQSINRYLAWYQQKPGQ |
| | | | | APRLLIYTASNRATGIPDRFSGSGSGTDFTLTISRLEP |
| | | | | EDFAVYYCHHYGSSIFTFGCGTKVEIKSGGGGSEVQ |
| | | | | LVESGGGLVQPGGSLKLSCAASGFTFNKYAMNWVR |
| | | | | QAPGKGLEWVARIRSKYNNYATYYADSVKDRFTIS |
| | | | | RDDSKNTAYLQMNNLKTEDTAVYYCVRHGNFGNS |
| | | | | YISYWAYWGQGTLVTVSSGGGGSGGGGSGGGGSQ |
| | | | | TVVTQEPSLTVSPGGTVTLTCGSSTGAVTSGNYPNW |
| | | | | VQQKPGQAPRGLIGGTKFLAPGTPARFSGSLLGGKA |
| | | | | ALTLSGVQPEDEAEYYCVLWYSNRWVFGGGTKLTV |
| | | | | LGGGGDKTHTCPPCPAPELLGGPSVFLFPPKPKDTL |
| | | | | MISRTPEVTCVVVDVSHEDPEVKFNWYVDGVEVHN |
| | | | | AKTKPCEEQYGSTYRCVSVLTVLHQDWLNGKEYKC |
| | | | | KVSNKALPAPIEKTISKAKGQPREPQVYTLPPSREEM |
| | | | | TKNQVSLTCLVKGFYPSDIAVEWESNGQPENNYKTT |
| | | | | PPVLDSDGSFFLYSKLTVDKSRWQQGNVFSCSVMH |
| | | | | EALHNHYTQKSLSLSPGKGGGGSGGGGSGGGGSGG |
| | | | | GGSGGGGSGGGGSDKTHTCPPCPAPELLGGPSVFLF |
| | | | | PPKPKDTLMISRTPEVTCVVVDVSHEDPEVKFNWYV |
| | | | | DGVEVHNAKTKPCEEQYGSTYRCVSVLTVLHQDWL |
| | | | | NGKEYKCKVSNKALPAPIEKTISKAKGQPREPQVYT |
| | | | | LPPSREEMTKNQVSLTCLVKGFYPSDIAVEWESNGQ |
| | | | | PENNYKTTPPVLDSDGSFFLYSKLTVDKSRWQQGN |
| | | | | VFSCSVMHEALHNHYTQKSLSLSPGK |
| 220. | MU 5-H4 CC x | artificial | aa | SYGMH |
| | I2C0-scFc VH | | | |
| | CDR1 | | | |
| 221. | MU 5-H4 CC x | artificial | aa | VIWFQGSNKYYADAVKG |
| | I2C0-scFc VH | | | |
| | CDR2 | | | |
| 222. | MU 5-H4 CC x | artificial | aa | GGYTYGFDY |
| | I2C0-scFc VH | | | |
| | CDR3 | | | |
| 223. | MU 5-H4 CC x | artificial | aa | RASQSINRYLA |
| | I2C0-scFc VL | | | |
| | CDR1 | | | |
| 224. | MU 5-H4 CC x | artificial | aa | TASNRAT |
| | I2C0-scFc VL | | | |
| | CDR2 | | | |
| 225. | MU 5-H4 CC x | artificial | aa | HHYGSSIFT |
| | I2C0-scFc VL | | | |
| | CDR3 | | | |
| 226. | MU 5-H4 CC x | artificial | aa | QVQLVESGGGLVQPGGSLRLSCAASGFTFSSYGMH |
| | I2C0-scFc VH | | | WVRQAPGKCLEWVAVIWFQGSNKYYADAVKGRFT |
| | | | | ISRDNSKNTLYLQMNNLRAEDTAVYYCARGGYTYG |
| | | | | FDYWGQGTLVTVSS |
| 227. | MU 5-H4 CC x | artificial | aa | EIVLTQSPGTLSLSPGERATLSCRASQSINRYLAWYQ |
| | I2C0-scFc VL | | | QKPGQAPRLLIYTASNRATGIPDRFSGSGSGTDFTLTI |
| | | | | SRLEPEDFAVYYCHHYGSSIFTFGCGTKVEIK |
| 228. | MU 5-H4 CC x | artificial | aa | QVQLVESGGGLVQPGGSLRLSCAASGFTFSSYGMH |
| | I2C0-scFc scFv | | | WVRQAPGKCLEWVAVIWFQGSNKYYADAVKGRFT |
| | | | | ISRDNSKNTLYLQMNNLRAEDTAVYYCARGGYTYG |
| | | | | FDYWGQGTLVTVSSGGGGSGGGGSGGGGSEIVLTQ |
| | | | | SPGTLSLSPGERATLSCRASQSINRYLAWYQQKPGQ |
| | | | | APRLLIYTASNRATGIPDRFSGSGSGTDFTLTISRLEP |
| | | | | EDFAVYYCHHYGSSIFTFGCGTKVEIK |
| 229. | MU 5-H4 CC x | artificial | aa | QVQLVESGGGLVQPGGSLRLSCAASGFTFSSYGMH |
| | I2C0-scFc | | | WVRQAPGKCLEWVAVIWFQGSNKYYADAVKGRFT |
| | Bispecific molecule | | | ISRDNSKNTLYLQMNNLRAEDTAVYYCARGGYTYG |
| | | | | FDYWGQGTLVTVSSGGGGSGGGGSGGGGSEIVLTQ |
| | | | | SPGTLSLSPGERATLSCRASQSINRYLAWYQQKPGQ |
| | | | | APRLLIYTASNRATGIPDRFSGSGSGTDFTLTISRLEP |
| | | | | EDFAVYYCHHYGSSIFTFGCGTKVEIKSGGGGSEVQ |
| | | | | LVESGGGLVQPGGSLKLSCAASGFTFNKYAMNWVR |
| | | | | QAPGKGLEWVARIRSKYNNYATYYADSVKDRFTIS |
| | | | | RDDSKNTAYLQMNNLKTEDTAVYYCVRHGNFGNS |
| | | | | YISYWAYWGQGTLVTVSSGGGGSGGGGSGGGGSQ |
| | | | | TVVTQEPSLTVSPGGTVTLTCGSSTGAVTSGNYPNW |
| | | | | VQQKPGQAPRGLIGGTKFLAPGTPARFSGSLLGGKA |
| | | | | ALTLSGVQPEDEAEYYCVLWYSNRWVFGGGTKLTV |
| | | | | L |
| 230. | MU 5-H4 CC x | artificial | aa | QVQLVESGGGLVQPGGSLRLSCAASGFTFSSYGMH |
| | I2C0-scFc | | | WVRQAPGKCLEWVAVIWFQGSNKYYADAVKGRFT |
| | Bispecific HLE | | | ISRDNSKNTLYLQMNNLRAEDTAVYYCARGGYTYG |
| | molecule | | | FDYWGQGTLVTVSSGGGGSGGGGSGGGGSEIVLTQ |
| | | | | SPGTLSLSPGERATLSCRASQSINRYLAWYQQKPGQ |
| | | | | APRLLIYTASNRATGIPDRFSGSGSGTDFTLTISRLEP |
| | | | | EDFAVYYCHHYGSSIFTFGCGTKVEIKSGGGGSEVQ |
| | | | | LVESGGGLVQPGGSLKLSCAASGFTFNKYAMNWVR |
| | | | | QAPGKGLEWVARIRSKYNNYATYYADSVKDRFTIS |
| | | | | RDDSKNTAYLQMNNLKTEDTAVYYCVRHGNFGNS |
| | | | | YISYWAYWGQGTLVTVSSGGGGSGGGGSGGGGSQ |
| | | | | TVVTQEPSLTVSPGGTVTLTCGSSTGAVTSGNYPNW |
| | | | | VQQKPGQAPRGLIGGTKFLAPGTPARFSGSLLGGKA |
| | | | | ALTLSGVQPEDEAEYYCVLWYSNRWVFGGGTKLTV |
| | | | | LGGGGDKTHTCPPCPAPELLGGPSVFLFPPKPKDTL |
| | | | | MISRTPEVTCVVVDVSHEDPEVKFNWYVDGVEVHN |
| | | | | AKTKPCEEQYGSTYRCVSVLTVLHQDWLNGKEYKC |
| | | | | KVSNKALPAPIEKTISKAKGQPREPQVYTLPPSREEM |
| | | | | TKNQVSLTCLVKGFYPSDIAVEWESNGQPENNYKTT |
| | | | | PPVLDSDGSFFLYSKLTVDKSRWQQGNVFSCSVMH |
| | | | | EALHNHYTQKSLSLSPGKGGGGSGGGGSGGGGSGG |
| | | | | GGSGGGGSGGGGSDKTHTCPPCPAPELLGGPSVFLF |
| | | | | PPKPKDTLMISRTPEVTCVVVDVSHEDPEVKFNWYV |
| | | | | DGVEVHNAKTKPCEEQYGSTYRCVSVLTVLHQDWL |
| | | | | NGKEYKCKVSNKALPAPIEKTISKAKGQPREPQVYT |
| | | | | LPPSREEMTKNQVSLTCLVKGFYPSDIAVEWESNGQ |
| | | | | PENNYKTTPPVLDSDGSFFLYSKLTVDKSRWQQGN |
| | | | | VFSCSVMHEALHNHYTQKSLSLSPGK |
| 231. | MU 5-H1 CC x | artificial | aa | SGGYNWA |
| | I2C0-scFc VH | | | |
| | CDR1 | | | |
| 232. | MU 5-H1 CC x | artificial | aa | YIYYSGSTYYNPSLKS |
| | I2C0-scFc VH | | | |
| | CDR2 | | | |
| 233. | MU 5-H1 CC x | artificial | aa | EKYSSRWTFFDY |
| | I2C0-scFc VH | | | |
| | CDR3 | | | |
| 234. | MU 5-H1 CC x | artificial | aa | SGDKLGDNYAS |
| | I2C0-scFc VL | | | |
| | CDR1 | | | |
| 235. | MU 5-H1 CC x | artificial | aa | HDNKRPS |
| | I2C0-scFc VL | | | |
| | CDR2 | | | |
| 236. | MU 5-H1 CC x | artificial | aa | QAFQSSTVV |
| | I2C0-scFc VL | | | |
| | CDR3 | | | |
| 237. | MU 5-H1 CC x | artificial | aa | QVQLQESGPGLVKPSETLSLTCTVSGDSISSGGYNW |
| | I2C0-scFc VH | | | AWIRQHPGKCLEWIGYIYYSGSTYYNPSLKSRVTISV |
| | | | | DTSKNQFSLKLSSVTAADTAVYYCAREKYSSRWTFF |
| | | | | DYWGQGTLVTVSS |
| 238. | MU 5-H1 CC x | artificial | aa | SYELTQPPSVSVSPGQTASITCSGDKLGDNYASWYQ |
| | I2C0-scFc VL | | | QKPGQSPVLVIYHDNKRPSGIPERFSGSNSGNTATLTI |
| | | | | SGTQAMDEADYYCQAFQSSTVVFGCGTKLTVL |
| 239. | MU 5-H1 CC x | artificial | aa | QVQLQESGPGLVKPSETLSLTCTVSGDSISSGGYNW |
| | I2C0-scFc scFv | | | AWIRQHPGKCLEWIGYIYYSGSTYYNPSLKSRVTISV |
| | | | | DTSKNQFSLKLSSVTAADTAVYYCAREKYSSRWTFF |
| | | | | DYWGQGTLVTVSSGGGGSGGGGSGGGGSSYELTQP |
| | | | | PSVSVSPGQTASITCSGDKLGDNYASWYQQKPGQSP |
| | | | | VLVIYHDNKRPSGIPERFSGSNSGNTATLTISGTQAM |
| | | | | DEADYYCQAFQSSTVVFGCGTKLTVL |
| 240. | MU 5-H1 CC x | artificial | aa | QVQLQESGPGLVKPSETLSLTCTVSGDSISSGGYNW |
| | I2C0-scFc | | | AWIRQHPGKCLEWIGYIYYSGSTYYNPSLKSRVTISV |
| | Bispecific molecule | | | DTSKNQFSLKLSSVTAADTAVYYCAREKYSSRWTFF |
| | | | | DYWGQGTLVTVSSGGGGSGGGGSGGGGSSYELTQP |
| | | | | PSVSVSPGQTASITCSGDKLGDNYASWYQQKPGQSP |
| | | | | VLVIYHDNKRPSGIPERFSGSNSGNTATLTISGTQAM |
| | | | | DEADYYCQAFQSSTVVFGCGTKLTVLSGGGGSEVQ |
| | | | | LVESGGGLVQPGGSLKLSCAASGFTFNKYAMNWVR |
| | | | | QAPGKGLEWVARIRSKYNNYATYYADSVKDRFTIS |
| | | | | RDDSKNTAYLQMNNLKTEDTAVYYCVRHGNFGNS |
| | | | | YISYWAYWGQGTLVTVSSGGGGSGGGGSGGGGSQ |
| | | | | TVVTQEPSLTVSPGGTVTLTCGSSTGAVTSGNYPNW |
| | | | | VQQKPGQAPRGLIGGTKFLAPGTPARFSGSLLGGKA |
| | | | | ALTLSGVQPEDEAEYYCVLWYSNRWVFGGGTKLTV |
| | | | | L |
| 241. | MU 5-H1 CC x | artificial | aa | QVQLQESGPGLVKPSETLSLTCTVSGDSISSGGYNW |
| | I2C0-scFc | | | AWIRQHPGKCLEWIGYIYYSGSTYYNPSLKSRVTISV |
| | Bispecific HLE | | | DTSKNQFSLKLSSVTAADTAVYYCAREKYSSRWTFF |
| | molecule | | | DYWGQGTLVTVSSGGGGSGGGGSGGGGSSYELTQP |
| | | | | PSVSVSPGQTASITCSGDKLGDNYASWYQQKPGQSP |
| | | | | VLVIYHDNKRPSGIPERFSGSNSGNTATLTISGTQAM |
| | | | | DEADYYCQAFQSSTVVFGCGTKLTVLSGGGGSEVQ |
| | | | | LVESGGGLVQPGGSLKLSCAASGFTFNKYAMNWVR |
| | | | | QAPGKGLEWVARIRSKYNNYATYYADSVKDRFTIS |
| | | | | RDDSKNTAYLQMNNLKTEDTAVYYCVRHGNFGNS |
| | | | | YISYWAYWGQGTLVTVSSGGGGSGGGGSGGGGSQ |
| | | | | TVVTQEPSLTVSPGGTVTLTCGSSTGAVTSGNYPNW |
| | | | | VQQKPGQAPRGLIGGTKFLAPGTPARFSGSLLGGKA |
| | | | | ALTLSGVQPEDEAEYYCVLWYSNRWVFGGGTKLTV |
| | | | | LGGGGDKTHTCPPCPAPELLGGPSVFLFPPKPKDTL |
| | | | | MISRTPEVTCVVVDVSHEDPEVKFNWYVDGVEVHN |
| | | | | AKTKPCEEQYGSTYRCVSVLTVLHQDWLNGKEYKC |
| | | | | KVSNKALPAPIEKTISKAKGQPREPQVYTLPPSREEM |
| | | | | TKNQVSLTCLVKGFYPSDIAVEWESNGQPENNYKTT |
| | | | | PPVLDSDGSFFLYSKLTVDKSRWQQGNVFSCSVMH |
| | | | | EALHNHYTQKSLSLSPGKGGGGSGGGGSGGGGSGG |
| | | | | GGSGGGGSGGGGSDKTHTCPPCPAPELLGGPSVFLF |
| | | | | PPKPKDTLMISRTPEVTCVVVDVSHEDPEVKFNWYV |
| | | | | DGVEVHNAKTKPCEEQYGSTYRCVSVLTVLHQDWL |
| | | | | NGKEYKCKVSNKALPAPIEKTISKAKGQPREPQVYT |
| | | | | LPPSREEMTKNQVSLTCLVKGFYPSDIAVEWESNGQ |
| | | | | PENNYKTTPPVLDSDGSFFLYSKLTVDKSRWQQGN |
| | | | | VFSCSVMHEALHNHYTQKSLSLSPGK |
| 242. | MU 4-H11 CC x | artificial | aa | NFGMH |
| | I2C0-scFc VH | | | |
| | CDR1 | | | |
| 243. | MU 4-H11 CC x | artificial | aa | VIWFDASKTYYAEAVKG |
| | I2C0-scFc VH | | | |
| | CDR2 | | | |
| 244. | MU 4-H11 CC x | artificial | aa | ATYSTGWSYFDY |
| | I2C0-scFc VH | | | |
| | CDR3 | | | |
| 245. | MU 4-H11 CC x | artificial | aa | SGDKLGDKYTS |
| | I2C0-scFc VL | | | |
| | CDR1 | | | |
| 246. | MU 4-H11 CC x | artificial | aa | HDAKRPS |
| | I2C0-scFc VL | | | |
| | CDR2 | | | |
| 247. | MU 4-H11 CC x | artificial | aa | QAYEASTAWV |
| | I2C0-scFc VL | | | |
| | CDR3 | | | |
| 248. | MU 4-H11 CC x | artificial | aa | QVQLVESGGGVVQPGRSLRLSCAASGFTFSNFGMH |
| | I2C0-scFc VH | | | WVRQAPGKCLEWVAVIWFDASKTYYAEAVKGRFTI |
| | | | | SRDTSMNTLYLQMNSLRAEDTAVYYCARATYSTG |
| | | | | WSYFDYWGQGTLVTVSS |
| 249. | MU 4-H11 CC x | artificial | aa | SYELTQPPSVSVSPGQTASITCSGDKLGDKYTSWYQ |
| | I2C0-scFc VL | | | QKPGQSPVLVIYHDAKRPSGIPERFSGSNSGNTATLTI |
| | | | | SGTQAMDEADYYCQAYEASTAWVFGCGTKLTVL |
| 250. | MU 4-H11 CC x | artificial | aa | QVQLVESGGGVVQPGRSLRLSCAASGFTFSNFGMH |
| | I2C0-scFc scFv | | | WVRQAPGKCLEWVAVIWFDASKTYYAEAVKGRFTI |
| | | | | SRDTSMNTLYLQMNSLRAEDTAVYYCARATYSTG |
| | | | | WSYFDYWGQGTLVTVSSGGGGSGGGGSGGGGSSY |
| | | | | ELTQPPSVSVSPGQTASITCSGDKLGDKYTSWYQQK |
| | | | | PGQSPVLVIYHDAKRPSGIPERFSGSNSGNTATLTISG |
| | | | | TQAMDEADYYCQAYEASTAWVFGCGTKLTVL |
| 251. | MU 4-H11 CC x | artificial | aa | QVQLVESGGGVVQPGRSLRLSCAASGFTFSNFGMH |
| | I2C0-scFc | | | WVRQAPGKCLEWVAVIWFDASKTYYAEAVKGRFTI |
| | Bispecific molecule | | | SRDTSMNTLYLQMNSLRAEDTAVYYCARATYSTG |
| | | | | WSYFDYWGQGTLVTVSSGGGGSGGGGSGGGGSSY |
| | | | | ELTQPPSVSVSPGQTASITCSGDKLGDKYTSWYQQK |
| | | | | PGQSPVLVIYHDAKRPSGIPERFSGSNSGNTATLTISG |
| | | | | TQAMDEADYYCQAYEASTAWVFGCGTKLTVLSGG |
| | | | | GGSEVQLVESGGGLVQPGGSLKLSCAASGFTFNKYA |
| | | | | MNWVRQAPGKGLEWVARIRSKYNNYATYYADSVK |
| | | | | DRFTISRDDSKNTAYLQMNNLKTEDTAVYYCVRHG |
| | | | | NFGNSYISYWAYWGQGTLVTVSSGGGGSGGGGSGG |
| | | | | GGSQTVVTQEPSLTVSPGGTVTLTCGSSTGAVTSGN |
| | | | | YPNWVQQKPGQAPRGLIGGTKFLAPGTPARFSGSLL |
| | | | | GGKAALTLSGVQPEDEAEYYCVLWYSNRWVFGGG |
| | | | | TKLTVL |
| 252. | MU 4-H11 CC x | artificial | aa | QVQLVESGGGVVQPGRSLRLSCAASGFTFSNFGMH |
| | I2C0-scFc | | | WVRQAPGKCLEWVAVIWFDASKTYYAEAVKGRFTI |
| | Bispecific HLE | | | SRDTSMNTLYLQMNSLRAEDTAVYYCARATYSTG |
| | molecule | | | WSYFDYWGQGTLVTVSSGGGGSGGGGSGGGGSSY |
| | | | | ELTQPPSVSVSPGQTASITCSGDKLGDKYTSWYQQK |
| | | | | PGQSPVLVIYHDAKRPSGIPERFSGSNSGNTATLTISG |
| | | | | TQAMDEADYYCQAYEASTAWVFGCGTKLTVLSGG |
| | | | | GGSEVQLVESGGGLVQPGGSLKLSCAASGFTFNKYA |
| | | | | MNWVRQAPGKGLEWVARIRSKYNNYATYYADSVK |
| | | | | DRFTISRDDSKNTAYLQMNNLKTEDTAVYYCVRHG |
| | | | | NFGNSYISYWAYWGQGTLVTVSSGGGGSGGGGSGG |
| | | | | GGSQTVVTQEPSLTVSPGGTVTLTCGSSTGAVTSGN |
| | | | | YPNWVQQKPGQAPRGLIGGTKFLAPGTPARFSGSLL |
| | | | | GGKAALTLSGVQPEDEAEYYCVLWYSNRWVFGGG |
| | | | | TKLTVLGGGGDKTHTCPPCPAPELLGGPSVFLFPPKP |
| | | | | KDTLMISRTPEVTCVVVDVSHEDPEVKFNWYVDGV |
| | | | | EVHNAKTKPCEEQYGSTYRCVSVLTVLHQDWLNGK |
| | | | | EYKCKVSNKALPAPIEKTISKAKGQPREPQVYTLPPS |
| | | | | REEMTKNQVSLTCLVKGFYPSDIAVEWESNGQPEN |
| | | | | NYKTTPPVLDSDGSFFLYSKLTVDKSRWQQGNVFSC |
| | | | | SVMHEALHNHYTQKSLSLSPGKGGGGSGGGGSGGG |
| | | | | GSGGGGSGGGGSGGGGSDKTHTCPPCPAPELLGGPS |
| | | | | VFLFPPKPKDTLMISRTPEVTCVVVDVSHEDPEVKFN |
| | | | | WYVDGVEVHNAKTKPCEEQYGSTYRCVSVLTVLH |
| | | | | QDWLNGKEYKCKVSNKALPAPIEKTISKAKGQPREP |
| | | | | QVYTLPPSREEMTKNQVSLTCLVKGFYPSDIAVEWE |
| | | | | SNGQPENNYKTTPPVLDSDGSFFLYSKLTVDKSRWQ |
| | | | | QGNVFSCSVMHEALHNHYTQKSLSLSPGK |
| 253. | MU 4-H2 CC x | artificial | aa | NFGMH |
| | I2C0-scFc VH | | | |
| | CDR1 | | | |
| 254. | MU 4-H2 CC x | artificial | aa | VIWFDASKTYYAESVKG |
| | I2C0-scFc VH | | | |
| | CDR2 | | | |
| 255. | MU 4-H2 CC x | artificial | aa | ATYSTGWSYFDY |
| | I2C0-scFc VH | | | |
| | CDR3 | | | |
| 256. | MU 4-H2 CC x | artificial | aa | SGDKLGDKYTS |
| | I2C0-scFc VL | | | |
| | CDR1 | | | |
| 257. | MU 4-H2 CC x | artificial | aa | HDAKRPS |
| | I2C0-scFc VL | | | |
| | CDR2 | | | |
| 258. | MU 4-H2 CC x | artificial | aa | QAWEASTAWV |
| | I2C0-scFc VL | | | |
| | CDR3 | | | |
| 259. | MU 4-H2 CC x | artificial | aa | QVQLVESGGGVVQPGRSLRLSCAASGFTFSNFGMH |
| | I2C0-scFc VH | | | WVRQAPGKCLEWVAVIWFDASKTYYAESVKGRFTI |
| | | | | SRDTSMNTLYLQMNSLRAEDTAVYYCARATYSTG |
| | | | | WSYFDYWGQGTLVTVSS |
| 260. | MU 4-H2 CC x | artificial | aa | SYELTQPPSVSVSPGQTASITCSGDKLGDKYTSWYQ |
| | I2C0-scFc VL | | | QKPGQSPVLVIYHDAKRPSGIPERFSGSNSGNTATLTI |
| | | | | SGTQAMDEADYYCQAWEASTAWVFGCGTKLTVL |
| 261. | MU 4-H2 CC x | artificial | aa | QVQLVESGGGVVQPGRSLRLSCAASGFTFSNFGMH |
| | I2C0-scFc scFv | | | WVRQAPGKCLEWVAVIWFDASKTYYAESVKGRFTI |
| | | | | SRDTSMNTLYLQMNSLRAEDTAVYYCARATYSTG |
| | | | | WSYFDYWGQGTLVTVSSGGGGSGGGGSGGGGSSY |
| | | | | ELTQPPSVSVSPGQTASITCSGDKLGDKYTSWYQQK |
| | | | | PGQSPVLVIYHDAKRPSGIPERFSGSNSGNTATLTISG |
| | | | | TQAMDEADYYCQAWEASTAWVFGCGTKLTVL |
| 262. | MU 4-H2 CC x | artificial | aa | QVQLVESGGGVVQPGRSLRLSCAASGFTFSNFGMH |
| | I2C0-scFc | | | WVRQAPGKCLEWVAVIWFDASKTYYAESVKGRFTI |
| | Bispecific molecule | | | SRDTSMNTLYLQMNSLRAEDTAVYYCARATYSTG |
| | | | | WSYFDYWGQGTLVTVSSGGGGSGGGGSGGGGSSY |
| | | | | ELTQPPSVSVSPGQTASITCSGDKLGDKYTSWYQQK |
| | | | | PGQSPVLVIYHDAKRPSGIPERFSGSNSGNTATLTISG |
| | | | | TQAMDEADYYCQAWEASTAWVFGCGTKLTVLSGG |
| | | | | GGSEVQLVESGGGLVQPGGSLKLSCAASGFTFNKYA |
| | | | | MNWVRQAPGKGLEWVARIRSKYNNYATYYADSVK |
| | | | | DRFTISRDDSKNTAYLQMNNLKTEDTAVYYCVRHG |
| | | | | NFGNSYISYWAYWGQGTLVTVSSGGGGSGGGGSGG |
| | | | | GGSQTVVTQEPSLTVSPGGTVTLTCGSSTGAVTSGN |
| | | | | YPNWVQQKPGQAPRGLIGGTKFLAPGTPARFSGSLL |
| | | | | GGKAALTLSGVQPEDEAEYYCVLWYSNRWVFGGG |
| | | | | TKLTVL |
| 263. | MU 4-H2 CC x | artificial | aa | QVQLVESGGGVVQPGRSLRLSCAASGFTFSNFGMH |
| | I2C0-scFc | | | WVRQAPGKCLEWVAVIWFDASKTYYAESVKGRFTI |
| | Bispecific HLE | | | SRDTSMNTLYLQMNSLRAEDTAVYYCARATYSTG |
| | molecule | | | WSYFDYWGQGTLVTVSSGGGGSGGGGSGGGGSSY |
| | | | | ELTQPPSVSVSPGQTASITCSGDKLGDKYTSWYQQK |
| | | | | PGQSPVLVIYHDAKRPSGIPERFSGSNSGNTATLTISG |
| | | | | TQAMDEADYYCQAWEASTAWVFGCGTKLTVLSGG |
| | | | | GGSEVQLVESGGGLVQPGGSLKLSCAASGFTFNKYA |
| | | | | MNWVRQAPGKGLEWVARIRSKYNNYATYYADSVK |
| | | | | DRFTISRDDSKNTAYLQMNNLKTEDTAVYYCVRHG |
| | | | | NFGNSYISYWAYWGQGTLVTVSSGGGGSGGGGSGG |
| | | | | GGSQTVVTQEPSLTVSPGGTVTLTCGSSTGAVTSGN |
| | | | | YPNWVQQKPGQAPRGLIGGTKFLAPGTPARFSGSLL |
| | | | | GGKAALTLSGVQPEDEAEYYCVLWYSNRWVFGGG |
| | | | | TKLTVLGGGGDKTHTCPPCPAPELLGGPSVFLFPPKP |
| | | | | KDTLMISRTPEVTCVVVDVSHEDPEVKFNWYVDGV |
| | | | | EVHNAKTKPCEEQYGSTYRCVSVLTVLHQDWLNGK |
| | | | | EYKCKVSNKALPAPIEKTISKAKGQPREPQVYTLPPS |
| | | | | REEMTKNQVSLTCLVKGFYPSDIAVEWESNGQPEN |
| | | | | NYKTTPPVLDSDGSFFLYSKLTVDKSRWQQGNVFSC |
| | | | | SVMHEALHNHYTQKSLSLSPGKGGGGSGGGGSGGG |
| | | | | GSGGGGSGGGGSGGGGSDKTHTCPPCPAPELLGGPS |
| | | | | VFLFPPKPKDTLMISRTPEVTCVVVDVSHEDPEVKFN |
| | | | | WYVDGVEVHNAKTKPCEEQYGSTYRCVSVLTVLH |
| | | | | QDWLNGKEYKCKVSNKALPAPIEKTISKAKGQPREP |
| | | | | QVYTLPPSREEMTKNQVSLTCLVKGFYPSDIAVEWE |
| | | | | SNGQPENNYKTTPPVLDSDGSFFLYSKLTVDKSRWQ |
| | | | | QGNVFSCSVMHEALHNHYTQKSLSLSPGK |
| 264. | MU 4-G4 CC x | artificial | aa | NFGMH |
| | I2C0-scFc VH | | | |
| | CDR1 | | | |
| 265. | MU 4-G4 CC x | artificial | aa | VIWFDASKTYYADAVKG |
| | I2C0-scFc VH | | | |
| | CDR2 | | | |
| 266. | MU 4-G4 CC x | artificial | aa | ATYSTGWSYFDY |
| | I2C0-scFc VH | | | |
| | CDR3 | | | |
| 267. | MU 4-G4 CC x | artificial | aa | SGDKLGDKYTS |
| | I2C0-scFc VL | | | |
| | CDR1 | | | |
| 268. | MU 4-G4 CC x | artificial | aa | HDAKRPS |
| | I2C0-scFc VL | | | |
| | CDR2 | | | |
| 269. | MU 4-G4 CC x | artificial | aa | QAWDASTAWV |
| | I2C0-scFc VL | | | |
| | CDR3 | | | |
| 270. | MU 4-G4 CC x | artificial | aa | QVQLVESGGGVVQPGRSLRLSCAASGFTFSNFGMH |
| | I2C0-scFc VH | | | WVRQAPGKCLEWVAVIWFDASKTYYADAVKGRFT |
| | | | | ISRDTSMNTLYLQMNSLRAEDTAVYYCARATYSTG |
| | | | | WSYFDYWGQGTLVTVSS |
| 271. | MU 4-G4 CC x | artificial | aa | SYELTQPPSVSVSPGQTASITCSGDKLGDKYTSWYQ |
| | I2C0-scFc VL | | | QKPGQSPVLVIYHDAKRPSGIPERFSGSNSGNTATLTI |
| | | | | SGTQAMDEADYYCQAWDASTAWVFGCGTKLTVL |
| 272. | MU 4-G4 CC x | artificial | aa | QVQLVESGGGVVQPGRSLRLSCAASGFTFSNFGMH |
| | I2C0-scFc scFv | | | WVRQAPGKCLEWVAVIWFDASKTYYADAVKGRFT |
| | | | | ISRDTSMNTLYLQMNSLRAEDTAVYYCARATYSTG |
| | | | | WSYFDYWGQGTLVTVSSGGGGSGGGGSGGGGSSY |
| | | | | ELTQPPSVSVSPGQTASITCSGDKLGDKYTSWYQQK |
| | | | | PGQSPVLVIYHDAKRPSGIPERFSGSNSGNTATLTISG |
| | | | | TQAMDEADYYCQAWDASTAWVFGCGTKLTVL |
| 273. | MU 4-G4 CC x | artificial | aa | QVQLVESGGGVVQPGRSLRLSCAASGFTFSNFGMH |
| | I2C0-scFc | | | WVRQAPGKCLEWVAVIWFDASKTYYADAVKGRFT |
| | Bispecific molecule | | | ISRDTSMNTLYLQMNSLRAEDTAVYYCARATYSTG |
| | | | | WSYFDYWGQGTLVTVSSGGGGSGGGGSGGGGSSY |
| | | | | ELTQPPSVSVSPGQTASITCSGDKLGDKYTSWYQQK |
| | | | | PGQSPVLVIYHDAKRPSGIPERFSGSNSGNTATLTISG |
| | | | | TQAMDEADYYCQAWDASTAWVFGCGTKLTVLSGG |
| | | | | GGSEVQLVESGGGLVQPGGSLKLSCAASGFTFNKYA |
| | | | | MNWVRQAPGKGLEWVARIRSKYNNYATYYADSVK |
| | | | | DRFTISRDDSKNTAYLQMNNLKTEDTAVYYCVRHG |
| | | | | NFGNSYISYWAYWGQGTLVTVSSGGGGSGGGGSGG |
| | | | | GGSQTVVTQEPSLTVSPGGTVTLTCGSSTGAVTSGN |
| | | | | YPNWVQQKPGQAPRGLIGGTKFLAPGTPARFSGSLL |
| | | | | GGKAALTLSGVQPEDEAEYYCVLWYSNRWVFGGG |
| | | | | TKLTVL |
| 274. | MU 4-G4 CC x | artificial | aa | QVQLVESGGGVVQPGRSLRLSCAASGFTFSNFGMH |
| | I2C0-scFc | | | WVRQAPGKCLEWVAVIWFDASKTYYADAVKGRFT |
| | Bispecific HLE | | | ISRDTSMNTLYLQMNSLRAEDTAVYYCARATYSTG |
| | molecule | | | WSYFDYWGQGTLVTVSSGGGGSGGGGSGGGGSSY |
| | | | | ELTQPPSVSVSPGQTASITCSGDKLGDKYTSWYQQK |
| | | | | PGQSPVLVIYHDAKRPSGIPERFSGSNSGNTATLTISG |
| | | | | TQAMDEADYYCQAWDASTAWVFGCGTKLTVLSGG |
| | | | | GGSEVQLVESGGGLVQPGGSLKLSCAASGFTFNKYA |
| | | | | MNWVRQAPGKGLEWVARIRSKYNNYATYYADSVK |
| | | | | DRFTISRDDSKNTAYLQMNNLKTEDTAVYYCVRHG |
| | | | | NFGNSYISYWAYWGQGTLVTVSSGGGGSGGGGSGG |
| | | | | GGSQTVVTQEPSLTVSPGGTVTLTCGSSTGAVTSGN |
| | | | | YPNWVQQKPGQAPRGLIGGTKFLAPGTPARFSGSLL |
| | | | | GGKAALTLSGVQPEDEAEYYCVLWYSNRWVFGGG |
| | | | | TKLTVLGGGGDKTHTCPPCPAPELLGGPSVFLFPPKP |
| | | | | KDTLMISRTPEVTCVVVDVSHEDPEVKFNWYVDGV |
| | | | | EVHNAKTKPCEEQYGSTYRCVSVLTVLHQDWLNGK |
| | | | | EYKCKVSNKALPAPIEKTISKAKGQPREPQVYTLPPS |
| | | | | REEMTKNQVSLTCLVKGFYPSDIAVEWESNGQPEN |
| | | | | NYKTTPPVLDSDGSFFLYSKLTVDKSRWQQGNVFSC |
| | | | | SVMHEALHNHYTQKSLSLSPGKGGGGSGGGGSGGG |
| | | | | GSGGGGSGGGGSGGGGSDKTHTCPPCPAPELLGGPS |
| | | | | VFLFPPKPKDTLMISRTPEVTCVVVDVSHEDPEVKFN |
| | | | | WYVDGVEVHNAKTKPCEEQYGSTYRCVSVLTVLH |
| | | | | QDWLNGKEYKCKVSNKALPAPIEKTISKAKGQPREP |
| | | | | QVYTLPPSREEMTKNQVSLTCLVKGFYPSDIAVEWE |
| | | | | SNGQPENNYKTTPPVLDSDGSFFLYSKLTVDKSRWQ |
| | | | | QGNVFSCSVMHEALHNHYTQKSLSLSPGK |
| 275. | MU 4-F6 CC x | artificial | aa | NFGMH |
| | I2C0-scFc VH | | | |
| | CDR1 | | | |
| 276. | MU 4-F6 CC x | artificial | aa | VIWFDASKTYYASSVKG |
| | I2C0-scFc VH | | | |
| | CDR2 | | | |
| 277. | MU 4-F6 CC x | artificial | aa | ATYSTGWSYFDY |
| | I2C0-scFc VH | | | |
| | CDR3 | | | |
| 278. | MU 4-F6 CC x | artificial | aa | SGDKLGDKYTS |
| | I2C0-scFc VL | | | |
| | CDR1 | | | |
| 279. | MU 4-F6 CC x | artificial | aa | HDAKRPS |
| | I2C0-scFc VL | | | |
| | CDR2 | | | |
| 280. | MU 4-F6 CC x | artificial | aa | QAYSASTAWV |
| | I2C0-scFc VL | | | |
| | CDR3 | | | |
| 281. | MU 4-F6 CC x | artificial | aa | QVQLVESGGGVVQPGRSLRLSCAASGFTFSNFGMH |
| | I2C0-scFc VH | | | WVRQAPGKCLEWVAVIWFDASKTYYASSVKGRFTI |
| | | | | SRDTSMNTLYLQMNSLRAEDTAVYYCARATYSTG |
| | | | | WSYFDYWGQGTLVTVSS |
| 282. | MU 4-F6 CC x | artificial | aa | SYELTQPPSVSVSPGQTASITCSGDKLGDKYTSWYQ |
| | I2C0-scFc VL | | | QKPGQSPVLVIYHDAKRPSGIPERFSGSNSGNTATLTI |
| | | | | SGTQAMDEADYYCQAYSASTAWVFGCGTKLTVL |
| 283. | MU 4-F6 CC x | artificial | aa | QVQLVESGGGVVQPGRSLRLSCAASGFTFSNFGMH |
| | I2C0-scFc scFv | | | WVRQAPGKCLEWVAVIWFDASKTYYASSVKGRFTI |
| | | | | SRDTSMNTLYLQMNSLRAEDTAVYYCARATYSTG |
| | | | | WSYFDYWGQGTLVTVSSGGGGSGGGGSGGGGSSY |
| | | | | ELTQPPSVSVSPGQTASITCSGDKLGDKYTSWYQQK |
| | | | | PGQSPVLVIYHDAKRPSGIPERFSGSNSGNTATLTISG |
| | | | | TQAMDEADYYCQAYSASTAWVFGCGTKLTVL |
| 284. | MU 4-F6 CC x | artificial | aa | QVQLVESGGGVVQPGRSLRLSCAASGFTFSNFGMH |
| | I2C0-scFc | | | WVRQAPGKCLEWVAVIWFDASKTYYASSVKGRFTI |
| | Bispecific molecule | | | SRDTSMNTLYLQMNSLRAEDTAVYYCARATYSTG |
| | | | | WSYFDYWGQGTLVTVSSGGGGSGGGGSGGGGSSY |
| | | | | ELTQPPSVSVSPGQTASITCSGDKLGDKYTSWYQQK |
| | | | | PGQSPVLVIYHDAKRPSGIPERFSGSNSGNTATLTISG |
| | | | | TQAMDEADYYCQAYSASTAWVFGCGTKLTVLSGG |
| | | | | GGSEVQLVESGGGLVQPGGSLKLSCAASGFTFNKYA |
| | | | | MNWVRQAPGKGLEWVARIRSKYNNYATYYADSVK |
| | | | | DRFTISRDDSKNTAYLQMNNLKTEDTAVYYCVRHG |
| | | | | NFGNSYISYWAYWGQGTLVTVSSGGGGSGGGGSGG |
| | | | | GGSQTVVTQEPSLTVSPGGTVTLTCGSSTGAVTSGN |
| | | | | YPNWVQQKPGQAPRGLIGGTKFLAPGTPARFSGSLL |
| | | | | GGKAALTLSGVQPEDEAEYYCVLWYSNRWVFGGG |
| | | | | TKLTVL |
| 285. | MU 4-F6 CC x | artificial | aa | QVQLVESGGGVVQPGRSLRLSCAASGFTFSNFGMH |
| | I2C0-scFc | | | WVRQAPGKCLEWVAVIWFDASKTYYASSVKGRFTI |
| | Bispecific HLE | | | SRDTSMNTLYLQMNSLRAEDTAVYYCARATYSTG |
| | molecule | | | WSYFDYWGQGTLVTVSSGGGGSGGGGSGGGGSSY |
| | | | | ELTQPPSVSVSPGQTASITCSGDKLGDKYTSWYQQK |
| | | | | PGQSPVLVIYHDAKRPSGIPERFSGSNSGNTATLTISG |
| | | | | TQAMDEADYYCQAYSASTAWVFGCGTKLTVLSGG |
| | | | | GGSEVQLVESGGGLVQPGGSLKLSCAASGFTFNKYA |
| | | | | MNWVRQAPGKGLEWVARIRSKYNNYATYYADSVK |
| | | | | DRFTISRDDSKNTAYLQMNNLKTEDTAVYYCVRHG |
| | | | | NFGNSYISYWAYWGQGTLVTVSSGGGGSGGGGSGG |
| | | | | GGSQTVVTQEPSLTVSPGGTVTLTCGSSTGAVTSGN |
| | | | | YPNWVQQKPGQAPRGLIGGTKFLAPGTPARFSGSLL |
| | | | | GGKAALTLSGVQPEDEAEYYCVLWYSNRWVFGGG |
| | | | | TKLTVLGGGGDKTHTCPPCPAPELLGGPSVFLFPPKP |
| | | | | KDTLMISRTPEVTCVVVDVSHEDPEVKFNWYVDGV |
| | | | | EVHNAKTKPCEEQYGSTYRCVSVLTVLHQDWLNGK |
| | | | | EYKCKVSNKALPAPIEKTISKAKGQPREPQVYTLPPS |
| | | | | REEMTKNQVSLTCLVKGFYPSDIAVEWESNGQPEN |
| | | | | NYKTTPPVLDSDGSFFLYSKLTVDKSRWQQGNVFSC |
| | | | | SVMHEALHNHYTQKSLSLSPGKGGGGSGGGGSGGG |
| | | | | GSGGGGSGGGGSGGGGSDKTHTCPPCPAPELLGGPS |
| | | | | VFLFPPKPKDTLMISRTPEVTCVVVDVSHEDPEVKFN |
| | | | | WYVDGVEVHNAKTKPCEEQYGSTYRCVSVLTVLH |
| | | | | QDWLNGKEYKCKVSNKALPAPIEKTISKAKGQPREP |
| | | | | QVYTLPPSREEMTKNQVSLTCLVKGFYPSDIAVEWE |
| | | | | SNGQPENNYKTTPPVLDSDGSFFLYSKLTVDKSRWQ |
| | | | | QGNVFSCSVMHEALHNHYTQKSLSLSPGK |
| 286. | MU 4-E7 CC x | artificial | aa | GYYWS |
| | I2C0-scFc VH | | | |
| | CDR1 | | | |
| 287. | MU 4-E7 CC x | artificial | aa | DIDYSGSTKYNPSLKS |
| | I2C0-scFc VH | | | |
| | CDR2 | | | |
| 288. | MU 4-E7 CC x | artificial | aa | KKYSTVWSYFDY |
| | I2C0-scFc VH | | | |
| | CDR3 | | | |
| 289. | MU 4-E7 CC x | artificial | aa | SGDKLGEKYAS |
| | I2C0-scFc VL | | | |
| | CDR1 | | | |
| 290. | MU 4-E7 CC x | artificial | aa | QDRKRPS |
| | I2C0-scFc VL | | | |
| | CDR2 | | | |
| 291. | MU 4-E7 CC x | artificial | aa | QAWGSSAAV |
| | I2C0-scFc VL | | | |
| | CDR3 | | | |
| 292. | MU 4-E7 CC x | artificial | aa | QVQLQQWGAGLLKPSETLSLTCAVYGGSFSGYYWS |
| | I2C0-scFc VH | | | WIRQPPGKCLEWIGDIDYSGSTKYNPSLKSRVTISLD |
| | | | | TSKNQFSLKLNSVTAADTAVYFCARKKYSTVWSYF |
| | | | | DYWGQGTLVTVSS |
| 293. | MU 4-E7 CC x | artificial | aa | SYELTQPSSVSVSPGQTASITCSGDKLGEKYASWYQ |
| | I2C0-scFc VL | | | QKPGQSPVLIIYQDRKRPSGVPERFSGSNSGNTATLTI |
| | | | | SGTQAMDEADYYCQAWGSSAAVFGCGTKLTVL |
| 294. | MU 4-E7 CC x | artificial | aa | QVQLQQWGAGLLKPSETLSLTCAVYGGSFSGYYWS |
| | I2C0-scFc scFv | | | WIRQPPGKCLEWIGDIDYSGSTKYNPSLKSRVTISLD |
| | | | | TSKNQFSLKLNSVTAADTAVYFCARKKYSTVWSYF |
| | | | | DYWGQGTLVTVSSGGGGSGGGGSGGGGSSYELTQP |
| | | | | SSVSVSPGQTASITCSGDKLGEKYASWYQQKPGQSP |
| | | | | VLIIYQDRKRPSGVPERFSGSNSGNTATLTISGTQAM |
| | | | | DEADYYCQAWGSSAAVFGCGTKLTVL |
| 295. | MU 4-E7 CC x | artificial | aa | QVQLQQWGAGLLKPSETLSLTCAVYGGSFSGYYWS |
| | I2C0-scFc | | | WIRQPPGKCLEWIGDIDYSGSTKYNPSLKSRVTISLD |
| | Bispecific molecule | | | TSKNQFSLKLNSVTAADTAVYFCARKKYSTVWSYF |
| | | | | DYWGQGTLVTVSSGGGGSGGGGSGGGGSSYELTQP |
| | | | | SSVSVSPGQTASITCSGDKLGEKYASWYQQKPGQSP |
| | | | | VLIIYQDRKRPSGVPERFSGSNSGNTATLTISGTQAM |
| | | | | DEADYYCQAWGSSAAVFGCGTKLTVLSGGGGSEV |
| | | | | QLVESGGGLVQPGGSLKLSCAASGFTFNKYAMNWV |
| | | | | RQAPGKGLEWVARIRSKYNNYATYYADSVKDRFTI |
| | | | | SRDDSKNTAYLQMNNLKTEDTAVYYCVRHGNFGN |
| | | | | SYISYWAYWGQGTLVTVSSGGGGSGGGGSGGGGSQ |
| | | | | TVVTQEPSLTVSPGGTVTLTCGSSTGAVTSGNYPNW |
| | | | | VQQKPGQAPRGLIGGTKFLAPGTPARFSGSLLGGKA |
| | | | | ALTLSGVQPEDEAEYYCVLWYSNRWVFGGGTKLTV |
| | | | | L |
| 296. | MU 4-E7 CC x | artificial | aa | QVQLQQWGAGLLKPSETLSLTCAVYGGSFSGYYWS |
| | I2C0-scFc | | | WIRQPPGKCLEWIGDIDYSGSTKYNPSLKSRVTISLD |
| | Bispecific HLE | | | TSKNQFSLKLNSVTAADTAVYFCARKKYSTVWSYF |
| | molecule | | | DYWGQGTLVTVSSGGGGSGGGGSGGGGSSYELTQP |
| | | | | SSVSVSPGQTASITCSGDKLGEKYASWYQQKPGQSP |
| | | | | VLIIYQDRKRPSGVPERFSGSNSGNTATLTISGTQAM |
| | | | | DEADYYCQAWGSSAAVFGCGTKLTVLSGGGGSEV |
| | | | | QLVESGGGLVQPGGSLKLSCAASGFTFNKYAMNWV |
| | | | | RQAPGKGLEWVARIRSKYNNYATYYADSVKDRFTI |
| | | | | SRDDSKNTAYLQMNNLKTEDTAVYYCVRHGNFGN |
| | | | | SYISYWAYWGQGTLVTVSSGGGGSGGGGSGGGGSQ |
| | | | | TVVTQEPSLTVSPGGTVTLTCGSSTGAVTSGNYPNW |
| | | | | VQQKPGQAPRGLIGGTKFLAPGTPARFSGSLLGGKA |
| | | | | ALTLSGVQPEDEAEYYCVLWYSNRWVFGGGTKLTV |
| | | | | LGGGGDKTHTCPPCPAPELLGGPSVFLFPPKPKDTL |
| | | | | MISRTPEVTCVVVDVSHEDPEVKFNWYVDGVEVHN |
| | | | | AKTKPCEEQYGSTYRCVSVLTVLHQDWLNGKEYKC |
| | | | | KVSNKALPAPIEKTISKAKGQPREPQVYTLPPSREEM |
| | | | | TKNQVSLTCLVKGFYPSDIAVEWESNGQPENNYKTT |
| | | | | PPVLDSDGSFFLYSKLTVDKSRWQQGNVFSCSVMH |
| | | | | EALHNHYTQKSLSLSPGKGGGGSGGGGSGGGGSGG |
| | | | | GGSGGGGSGGGGSDKTHTCPPCPAPELLGGPSVFLF |
| | | | | PPKPKDTLMISRTPEVTCVVVDVSHEDPEVKFNWYV |
| | | | | DGVEVHNAKTKPCEEQYGSTYRCVSVLTVLHQDWL |
| | | | | NGKEYKCKVSNKALPAPIEKTISKAKGQPREPQVYT |
| | | | | LPPSREEMTKNQVSLTCLVKGFYPSDIAVEWESNGQ |
| | | | | PENNYKTTPPVLDSDGSFFLYSKLTVDKSRWQQGN |
| | | | | VFSCSVMHEALHNHYTQKSLSLSPGK |
| 297. | MU 4-C11 CC x | artificial | aa | SYGMH |
| | I2C0-scFc VH | | | |
| | CDR1 | | | |
| 298. | MU 4-C11 CC x | artificial | aa | VISYDASNKYYASAVKG |
| | I2C0-scFc VH | | | |
| | CDR2 | | | |
| 299. | MU 4-C11 CC x | artificial | aa | GAYTYGFDY |
| | I2C0-scFc VH | | | |
| | CDR3 | | | |
| 300. | MU 4-C11 CC x | artificial | aa | RASQSVNRYLA |
| | I2C0-scFc VL | | | |
| | CDR1 | | | |
| 301. | MU 4-C11 CC x | artificial | aa | GASNRAT |
| | I2C0-scFc VL | | | |
| | CDR2 | | | |
| 302. | MU 4-C11 CC x | artificial | aa | HHYGSSIFA |
| | I2C0-scFc VL | | | |
| | CDR3 | | | |
| 303. | MU 4-C11 CC x | artificial | aa | QVQLVESGGGVVQPGRSLRLSCAASGFTFSSYGMH |
| | I2C0-scFc VH | | | WVRQAPGKCLEWVAVISYDASNKYYASAVKGRFTI |
| | | | | SRDNSKNTLYLQMNSLRAEDTAVYYCARGAYTYGF |
| | | | | DYWGQGTLVTVSS |
| 304. | MU 4-C11 CC x | artificial | aa | EIVLTQSPGTLSLSPGERATLSCRASQSVNRYLAWY |
| | I2C0-scFc VL | | | QQKPGQAPRLLIYGASNRATGIPDRFTGSGSGTDFTL |
| | | | | TISRLEPEDFAVYFCHHYGSSIFAFGCGTKVEIK |
| 305. | MU 4-C11 CC x | artificial | aa | QVQLVESGGGVVQPGRSLRLSCAASGFTFSSYGMH |
| | I2C0-scFc scFv | | | WVRQAPGKCLEWVAVISYDASNKYYASAVKGRFTI |
| | | | | SRDNSKNTLYLQMNSLRAEDTAVYYCARGAYTYGF |
| | | | | DYWGQGTLVTVSSGGGGSGGGGSGGGGSEIVLTQS |
| | | | | PGTLSLSPGERATLSCRASQSVNRYLAWYQQKPGQ |
| | | | | APRLLIYGASNRATGIPDRFTGSGSGTDFTLTISRLEP |
| | | | | EDFAVYFCHHYGSSIFAFGCGTKVEIK |
| 306. | MU 4-C11 CC x | artificial | aa | QVQLVESGGGVVQPGRSLRLSCAASGFTFSSYGMH |
| | I2C0-scFc | | | WVRQAPGKCLEWVAVISYDASNKYYASAVKGRFTI |
| | Bispecific molecule | | | SRDNSKNTLYLQMNSLRAEDTAVYYCARGAYTYGF |
| | | | | DYWGQGTLVTVSSGGGGSGGGGSGGGGSEIVLTQS |
| | | | | PGTLSLSPGERATLSCRASQSVNRYLAWYQQKPGQ |
| | | | | APRLLIYGASNRATGIPDRFTGSGSGTDFTLTISRLEP |
| | | | | EDFAVYFCHHYGSSIFAFGCGTKVEIKSGGGGSEVQ |
| | | | | LVESGGGLVQPGGSLKLSCAASGFTFNKYAMNWVR |
| | | | | QAPGKGLEWVARIRSKYNNYATYYADSVKDRFTIS |
| | | | | RDDSKNTAYLQMNNLKTEDTAVYYCVRHGNFGNS |
| | | | | YISYWAYWGQGTLVTVSSGGGGSGGGGSGGGGSQ |
| | | | | TVVTQEPSLTVSPGGTVTLTCGSSTGAVTSGNYPNW |
| | | | | VQQKPGQAPRGLIGGTKFLAPGTPARFSGSLLGGKA |
| | | | | ALTLSGVQPEDEAEYYCVLWYSNRWVFGGGTKLTV |
| | | | | L |
| 307. | MU 4-C11 CC x | artificial | aa | QVQLVESGGGVVQPGRSLRLSCAASGFTFSSYGMH |
| | I2C0-scFc | | | WVRQAPGKCLEWVAVISYDASNKYYASAVKGRFTI |
| | Bispecific HLE | | | SRDNSKNTLYLQMNSLRAEDTAVYYCARGAYTYGF |
| | molecule | | | DYWGQGTLVTVSSGGGGSGGGGSGGGGSEIVLTQS |
| | | | | PGTLSLSPGERATLSCRASQSVNRYLAWYQQKPGQ |
| | | | | APRLLIYGASNRATGIPDRFTGSGSGTDFTLTISRLEP |
| | | | | EDFAVYFCHHYGSSIFAFGCGTKVEIKSGGGGSEVQ |
| | | | | LVESGGGLVQPGGSLKLSCAASGFTFNKYAMNWVR |
| | | | | QAPGKGLEWVARIRSKYNNYATYYADSVKDRFTIS |
| | | | | RDDSKNTAYLQMNNLKTEDTAVYYCVRHGNFGNS |
| | | | | YISYWAYWGQGTLVTVSSGGGGSGGGGSGGGGSQ |
| | | | | TVVTQEPSLTVSPGGTVTLTCGSSTGAVTSGNYPNW |
| | | | | VQQKPGQAPRGLIGGTKFLAPGTPARFSGSLLGGKA |
| | | | | ALTLSGVQPEDEAEYYCVLWYSNRWVFGGGTKLTV |
| | | | | LGGGGDKTHTCPPCPAPELLGGPSVFLFPPKPKDTL |
| | | | | MISRTPEVTCVVVDVSHEDPEVKFNWYVDGVEVHN |
| | | | | AKTKPCEEQYGSTYRCVSVLTVLHQDWLNGKEYKC |
| | | | | KVSNKALPAPIEKTISKAKGQPREPQVYTLPPSREEM |
| | | | | TKNQVSLTCLVKGFYPSDIAVEWESNGQPENNYKTT |
| | | | | PPVLDSDGSFFLYSKLTVDKSRWQQGNVFSCSVMH |
| | | | | EALHNHYTQKSLSLSPGKGGGGSGGGGSGGGGSGG |
| | | | | GGSGGGGSGGGGSDKTHTCPPCPAPELLGGPSVFLF |
| | | | | PPKPKDTLMISRTPEVTCVVVDVSHEDPEVKFNWYV |
| | | | | DGVEVHNAKTKPCEEQYGSTYRCVSVLTVLHQDWL |
| | | | | NGKEYKCKVSNKALPAPIEKTISKAKGQPREPQVYT |
| | | | | LPPSREEMTKNQVSLTCLVKGFYPSDIAVEWESNGQ |
| | | | | PENNYKTTPPVLDSDGSFFLYSKLTVDKSRWQQGN |
| | | | | VFSCSVMHEALHNHYTQKSLSLSPGK |
| 308. | MU 4-C4 CC x | artificial | aa | SYGMH |
| | I2C0-scFc VH | | | |
| | CDR1 | | | |
| 309. | MU 4-C4 CC x | artificial | aa | VIWFDASNKYYAESVKG |
| | I2C0-scFc VH | | | |
| | CDR2 | | | |
| 310. | MU 4-C4 CC x | artificial | aa | GAYTYGFDY |
| | I2C0-scFc VH | | | |
| | CDR3 | | | |
| 311. | MU 4-C4 CC x | artificial | aa | RASQSVNRYLA |
| | I2C0-scFc VL | | | |
| | CDR1 | | | |
| 312. | MU 4-C4 CC x | artificial | aa | GASNRAT |
| | I2C0-scFc VL | | | |
| | CDR2 | | | |
| 313. | MU 4-C4 CC x | artificial | aa | HHYGSSIFA |
| | I2C0-scFc VL | | | |
| | CDR3 | | | |
| 314. | MU 4-C4 CC x | artificial | aa | QVQLVESGGGVVQPGRSLRLSCAASGFTFSSYGMH |
| | I2C0-scFc VH | | | WVRQAPGKCLEWVAVIWFDASNKYYAESVKGRFTI |
| | | | | SRDNSKNTLYLQMNSLRAEDTAVYYCARGAYTYGF |
| | | | | DYWGQGTLVTVSS |
| 315. | MU 4-C4 CC x | artificial | aa | EIVLTQSPGTLSLSPGERATLSCRASQSVNRYLAWY |
| | I2C0-scFc VL | | | QQKPGQAPRLLIYGASNRATGIPDRFTGSGSGTDFTL |
| | | | | TISRLEPEDFAVYFCHHYGSSIFAFGCGTKVEIK |
| 316. | MU 4-C4 CC x | artificial | aa | QVQLVESGGGVVQPGRSLRLSCAASGFTFSSYGMH |
| | I2C0-scFc scFv | | | WVRQAPGKCLEWVAVIWFDASNKYYAESVKGRFTI |
| | | | | SRDNSKNTLYLQMNSLRAEDTAVYYCARGAYTYGF |
| | | | | DYWGQGTLVTVSSGGGGSGGGGSGGGGSEIVLTQS |
| | | | | PGTLSLSPGERATLSCRASQSVNRYLAWYQQKPGQ |
| | | | | APRLLIYGASNRATGIPDRFTGSGSGTDFTLTISRLEP |
| | | | | EDFAVYFCHHYGSSIFAFGCGTKVEIK |
| 317. | MU 4-C4 CC x | artificial | aa | QVQLVESGGGVVQPGRSLRLSCAASGFTFSSYGMH |
| | I2C0-scFc | | | WVRQAPGKCLEWVAVIWFDASNKYYAESVKGRFTI |
| | Bispecific molecule | | | SRDNSKNTLYLQMNSLRAEDTAVYYCARGAYTYGF |
| | | | | DYWGQGTLVTVSSGGGGSGGGGSGGGGSEIVLTQS |
| | | | | PGTLSLSPGERATLSCRASQSVNRYLAWYQQKPGQ |
| | | | | APRLLIYGASNRATGIPDRFTGSGSGTDFTLTISRLEP |
| | | | | EDFAVYFCHHYGSSIFAFGCGTKVEIKSGGGGSEVQ |
| | | | | LVESGGGLVQPGGSLKLSCAASGFTFNKYAMNWVR |
| | | | | QAPGKGLEWVARIRSKYNNYATYYADSVKDRFTIS |
| | | | | RDDSKNTAYLQMNNLKTEDTAVYYCVRHGNFGNS |
| | | | | YISYWAYWGQGTLVTVSSGGGGSGGGGSGGGGSQ |
| | | | | TVVTQEPSLTVSPGGTVTLTCGSSTGAVTSGNYPNW |
| | | | | VQQKPGQAPRGLIGGTKFLAPGTPARFSGSLLGGKA |
| | | | | ALTLSGVQPEDEAEYYCVLWYSNRWVFGGGTKLTV |
| | | | | L |
| 318. | MU 4-C4 CC x | artificial | aa | QVQLVESGGGVVQPGRSLRLSCAASGFTFSSYGMH |
| | I2C0-scFc | | | WVRQAPGKCLEWVAVIWFDASNKYYAESVKGRFTI |
| | Bispecific HLE | | | SRDNSKNTLYLQMNSLRAEDTAVYYCARGAYTYGF |
| | molecule | | | DYWGQGTLVTVSSGGGGSGGGGSGGGGSEIVLTQS |
| | | | | PGTLSLSPGERATLSCRASQSVNRYLAWYQQKPGQ |
| | | | | APRLLIYGASNRATGIPDRFTGSGSGTDFTLTISRLEP |
| | | | | EDFAVYFCHHYGSSIFAFGCGTKVEIKSGGGGSEVQ |
| | | | | LVESGGGLVQPGGSLKLSCAASGFTFNKYAMNWVR |
| | | | | QAPGKGLEWVARIRSKYNNYATYYADSVKDRFTIS |
| | | | | RDDSKNTAYLQMNNLKTEDTAVYYCVRHGNFGNS |
| | | | | YISYWAYWGQGTLVTVSSGGGGSGGGGSGGGGSQ |
| | | | | TVVTQEPSLTVSPGGTVTLTCGSSTGAVTSGNYPNW |
| | | | | VQQKPGQAPRGLIGGTKFLAPGTPARFSGSLLGGKA |
| | | | | ALTLSGVQPEDEAEYYCVLWYSNRWVFGGGTKLTV |
| | | | | LGGGGDKTHTCPPCPAPELLGGPSVFLFPPKPKDTL |
| | | | | MISRTPEVTCVVVDVSHEDPEVKFNWYVDGVEVHN |
| | | | | AKTKPCEEQYGSTYRCVSVLTVLHQDWLNGKEYKC |
| | | | | KVSNKALPAPIEKTISKAKGQPREPQVYTLPPSREEM |
| | | | | TKNQVSLTCLVKGFYPSDIAVEWESNGQPENNYKTT |
| | | | | PPVLDSDGSFFLYSKLTVDKSRWQQGNVFSCSVMH |
| | | | | EALHNHYTQKSLSLSPGKGGGGSGGGGSGGGGSGG |
| | | | | GGSGGGGSGGGGSDKTHTCPPCPAPELLGGPSVFLF |
| | | | | PPKPKDTLMISRTPEVTCVVVDVSHEDPEVKFNWYV |
| | | | | DGVEVHNAKTKPCEEQYGSTYRCVSVLTVLHQDWL |
| | | | | NGKEYKCKVSNKALPAPIEKTISKAKGQPREPQVYT |
| | | | | LPPSREEMTKNQVSLTCLVKGFYPSDIAVEWESNGQ |
| | | | | PENNYKTTPPVLDSDGSFFLYSKLTVDKSRWQQGN |
| | | | | VFSCSVMHEALHNHYTQKSLSLSPGK |
| 319. | MU 4-C3 CC x | artificial | aa | SYGMH |
| | I2C0-scFc VH | | | |
| | CDR1 | | | |
| 320. | MU 4-C3 CC x | artificial | aa | VISYEGSNKYYAESVKG |
| | I2C0-scFc VH | | | |
| | CDR2 | | | |
| 321. | MU 4-C3 CC x | artificial | aa | GAYTYGFDY |
| | I2C0-scFc VH | | | |
| | CDR3 | | | |
| 322. | MU 4-C3 CC x | artificial | aa | RASQSVNRYLA |
| | I2C0-scFc VL | | | |
| | CDR1 | | | |
| 323. | MU 4-C3 CC x | artificial | aa | GASNRAT |
| | I2C0-scFc VL | | | |
| | CDR2 | | | |
| 324. | MU 4-C3 CC x | artificial | aa | HHYGSSIFA |
| | I2C0-scFc VL | | | |
| | CDR3 | | | |
| 325. | MU 4-C3 CC x | artificial | aa | QVQLVESGGGVVQPGRSLRLSCAASGFTFSSYGMH |
| | I2C0-scFc VH | | | WVRQAPGKCLEWVAVISYEGSNKYYAESVKGRFTI |
| | | | | SRDNSKNTLYLQMNSLRAEDTAVYYCARGAYTYGF |
| | | | | DYWGQGTLVTVSS |
| 326. | MU 4-C3 CC x | artificial | aa | EIVLTQSPGTLSLSPGERATLSCRASQSVNRYLAWY |
| | I2C0-scFc VL | | | QQKPGQAPRLLIYGASNRATGIPDRFTGSGSGTDFTL |
| | | | | TISRLEPEDFAVYFCHHYGSSIFAFGCGTKVEIK |
| 327. | MU 4-C3 CC x | artificial | aa | QVQLVESGGGVVQPGRSLRLSCAASGFTFSSYGMH |
| | I2C0-scFc | | | WVRQAPGKCLEWVAVISYEGSNKYYAESVKGRFTI |
| | | | | SRDNSKNTLYLQMNSLRAEDTAVYYCARGAYTYGF |
| | | | | DYWGQGTLVTVSSGGGGSGGGGSGGGGSEIVLTQS |
| | | | | PGTLSLSPGERATLSCRASQSVNRYLAWYQQKPGQ |
| | | | | APRLLIYGASNRATGIPDRFTGSGSGTDFTLTISRLEP |
| | | | | EDFAVYFCHHYGSSIFAFGCGTKVEIK |
| 328. | MU 4-C3 CC x | artificial | aa | QVQLVESGGGVVQPGRSLRLSCAASGFTFSSYGMH |
| | I2C0-scFc | | | WVRQAPGKCLEWVAVISYEGSNKYYAESVKGRFTI |
| | Bispecific molecule | | | SRDNSKNTLYLQMNSLRAEDTAVYYCARGAYTYGF |
| | | | | DYWGQGTLVTVSSGGGGSGGGGSGGGGSEIVLTQS |
| | | | | PGTLSLSPGERATLSCRASQSVNRYLAWYQQKPGQ |
| | | | | APRLLIYGASNRATGIPDRFTGSGSGTDFTLTISRLEP |
| | | | | EDFAVYFCHHYGSSIFAFGCGTKVEIKSGGGGSEVQ |
| | | | | LVESGGGLVQPGGSLKLSCAASGFTFNKYAMNWVR |
| | | | | QAPGKGLEWVARIRSKYNNYATYYADSVKDRFTIS |
| | | | | RDDSKNTAYLQMNNLKTEDTAVYYCVRHGNFGNS |
| | | | | YISYWAYWGQGTLVTVSSGGGGSGGGGSGGGGSQ |
| | | | | TVVTQEPSLTVSPGGTVTLTCGSSTGAVTSGNYPNW |
| | | | | VQQKPGQAPRGLIGGTKFLAPGTPARFSGSLLGGKA |
| | | | | ALTLSGVQPEDEAEYYCVLWYSNRWVFGGGTKLTV |
| | | | | L |
| 329. | MU 4-C3 CC x | artificial | aa | QVQLVESGGGVVQPGRSLRLSCAASGFTFSSYGMH |
| | I2C0-scFc | | | WVRQAPGKCLEWVAVISYEGSNKYYAESVKGRFTI |
| | Bispecific HLE | | | SRDNSKNTLYLQMNSLRAEDTAVYYCARGAYTYGF |
| | molecule | | | DYWGQGTLVTVSSGGGGSGGGGSGGGGSEIVLTQS |
| | | | | PGTLSLSPGERATLSCRASQSVNRYLAWYQQKPGQ |
| | | | | APRLLIYGASNRATGIPDRFTGSGSGTDFTLTISRLEP |
| | | | | EDFAVYFCHHYGSSIFAFGCGTKVEIKSGGGGSEVQ |
| | | | | LVESGGGLVQPGGSLKLSCAASGFTFNKYAMNWVR |
| | | | | QAPGKGLEWVARIRSKYNNYATYYADSVKDRFTIS |
| | | | | RDDSKNTAYLQMNNLKTEDTAVYYCVRHGNFGNS |
| | | | | YISYWAYWGQGTLVTVSSGGGGSGGGGSGGGGSQ |
| | | | | TVVTQEPSLTVSPGGTVTLTCGSSTGAVTSGNYPNW |
| | | | | VQQKPGQAPRGLIGGTKFLAPGTPARFSGSLLGGKA |
| | | | | ALTLSGVQPEDEAEYYCVLWYSNRWVFGGGTKLTV |
| | | | | LGGGGDKTHTCPPCPAPELLGGPSVFLFPPKPKDTL |
| | | | | MISRTPEVTCVVVDVSHEDPEVKFNWYVDGVEVHN |
| | | | | AKTKPCEEQYGSTYRCVSVLTVLHQDWLNGKEYKC |
| | | | | KVSNKALPAPIEKTISKAKGQPREPQVYTLPPSREEM |
| | | | | TKNQVSLTCLVKGFYPSDIAVEWESNGQPENNYKTT |
| | | | | PPVLDSDGSFFLYSKLTVDKSRWQQGNVFSCSVMH |
| | | | | EALHNHYTQKSLSLSPGKGGGGSGGGGSGGGGSGG |
| | | | | GGSGGGGSGGGGSDKTHTCPPCPAPELLGGPSVFLF |
| | | | | PPKPKDTLMISRTPEVTCVVVDVSHEDPEVKFNWYV |
| | | | | DGVEVHNAKTKPCEEQYGSTYRCVSVLTVLHQDWL |
| | | | | NGKEYKCKVSNKALPAPIEKTISKAKGQPREPQVYT |
| | | | | LPPSREEMTKNQVSLTCLVKGFYPSDIAVEWESNGQ |
| | | | | PENNYKTTPPVLDSDGSFFLYSKLTVDKSRWQQGN |
| | | | | VFSCSVMHEALHNHYTQKSLSLSPGK |
| 330. | MU 4-B10 CC x | artificial | aa | NFGMH |
| | I2C0-scFc VH | | | |
| | CDR1 | | | |
| 331. | MU 4-B10 CC x | artificial | aa | VIWFDASKTYYASSVKG |
| | I2C0-scFc VH | | | |
| | CDR2 | | | |
| 332. | MU 4-B10 CC x | artificial | aa | ATYSTGWSYFDY |
| | I2C0-scFc VH | | | |
| | CDR3 | | | |
| 333. | MU 4-B10 CC x | artificial | aa | SGDKLGDKYTS |
| | I2C0-scFc VL | | | |
| | CDR1 | | | |
| 334. | MU 4-B10 CC x | artificial | aa | HDAKRPS |
| | I2C0-scFc VL | | | |
| | CDR2 | | | |
| 335. | MU 4-B10 CC x | artificial | aa | QAWSASTAWV |
| | I2C0-scFc VL | | | |
| | CDR3 | | | |
| 336. | MU 4-B10 CC x | artificial | aa | QVQLVESGGGVVQPGRSLRLSCAASGFTFSNFGMH |
| | I2C0-scFc VH | | | WVRQAPGKCLEWVAVIWFDASKTYYASSVKGRFTI |
| | | | | SRDTSMNTLYLQMNSLRAEDTAVYYCARATYSTG |
| | | | | WSYFDYWGQGTLVTVSS |
| 337. | MU 4-B10 CC x | artificial | aa | SYELTQPPSVSVSPGQTASITCSGDKLGDKYTSWYQ |
| | I2C0-scFc VL | | | QKPGQSPVLVIYHDAKRPSGIPERFSGSNSGNTATLTI |
| | | | | SGTQAMDEADYYCQAWSASTAWVFGCGTKLTVL |
| 338. | MU 4-B10 CC x | artificial | aa | QVQLVESGGGVVQPGRSLRLSCAASGFTFSNFGMH |
| | I2C0-scFc scFv | | | WVRQAPGKCLEWVAVIWFDASKTYYASSVKGRFTI |
| | | | | SRDTSMNTLYLQMNSLRAEDTAVYYCARATYSTG |
| | | | | WSYFDYWGQGTLVTVSSGGGGSGGGGSGGGGSSY |
| | | | | ELTQPPSVSVSPGQTASITCSGDKLGDKYTSWYQQK |
| | | | | PGQSPVLVIYHDAKRPSGIPERFSGSNSGNTATLTISG |
| | | | | TQAMDEADYYCQAWSASTAWVFGCGTKLTVL |
| 339. | MU 4-B10 CC x | artificial | aa | QVQLVESGGGVVQPGRSLRLSCAASGFTFSNFGMH |
| | I2C0-scFc | | | WVRQAPGKCLEWVAVIWFDASKTYYASSVKGRFTI |
| | Bispecific molecule | | | SRDTSMNTLYLQMNSLRAEDTAVYYCARATYSTG |
| | | | | WSYFDYWGQGTLVTVSSGGGGSGGGGSGGGGSSY |
| | | | | ELTQPPSVSVSPGQTASITCSGDKLGDKYTSWYQQK |
| | | | | PGQSPVLVIYHDAKRPSGIPERFSGSNSGNTATLTISG |
| | | | | TQAMDEADYYCQAWSASTAWVFGCGTKLTVLSGG |
| | | | | GGSEVQLVESGGGLVQPGGSLKLSCAASGFTFNKYA |
| | | | | MNWVRQAPGKGLEWVARIRSKYNNYATYYADSVK |
| | | | | DRFTISRDDSKNTAYLQMNNLKTEDTAVYYCVRHG |
| | | | | NFGNSYISYWAYWGQGTLVTVSSGGGGSGGGGSGG |
| | | | | GGSQTVVTQEPSLTVSPGGTVTLTCGSSTGAVTSGN |
| | | | | YPNWVQQKPGQAPRGLIGGTKFLAPGTPARFSGSLL |
| | | | | GGKAALTLSGVQPEDEAEYYCVLWYSNRWVFGGG |
| | | | | TKLTVL |
| 340. | MU 4-B10 CC x | artificial | aa | QVQLVESGGGVVQPGRSLRLSCAASGFTFSNFGMH |
| | I2C0-scFc | | | WVRQAPGKCLEWVAVIWFDASKTYYASSVKGRFTI |
| | Bispecific HLE | | | SRDTSMNTLYLQMNSLRAEDTAVYYCARATYSTG |
| | molecule | | | WSYFDYWGQGTLVTVSSGGGGSGGGGSGGGGSSY |
| | | | | ELTQPPSVSVSPGQTASITCSGDKLGDKYTSWYQQK |
| | | | | PGQSPVLVIYHDAKRPSGIPERFSGSNSGNTATLTISG |
| | | | | TQAMDEADYYCQAWSASTAWVFGCGTKLTVLSGG |
| | | | | GGSEVQLVESGGGLVQPGGSLKLSCAASGFTFNKYA |
| | | | | MNWVRQAPGKGLEWVARIRSKYNNYATYYADSVK |
| | | | | DRFTISRDDSKNTAYLQMNNLKTEDTAVYYCVRHG |
| | | | | NFGNSYISYWAYWGQGTLVTVSSGGGGSGGGGSGG |
| | | | | GGSQTVVTQEPSLTVSPGGTVTLTCGSSTGAVTSGN |
| | | | | YPNWVQQKPGQAPRGLIGGTKFLAPGTPARFSGSLL |
| | | | | GGKAALTLSGVQPEDEAEYYCVLWYSNRWVFGGG |
| | | | | TKLTVLGGGGDKTHTCPPCPAPELLGGPSVFLFPPKP |
| | | | | KDTLMISRTPEVTCVVVDVSHEDPEVKFNWYVDGV |
| | | | | EVHNAKTKPCEEQYGSTYRCVSVLTVLHQDWLNGK |
| | | | | EYKCKVSNKALPAPIEKTISKAKGQPREPQVYTLPPS |
| | | | | REEMTKNQVSLTCLVKGFYPSDIAVEWESNGQPEN |
| | | | | NYKTTPPVLDSDGSFFLYSKLTVDKSRWQQGNVFSC |
| | | | | SVMHEALHNHYTQKSLSLSPGKGGGGSGGGGSGGG |
| | | | | GSGGGGSGGGGSGGGGSDKTHTCPPCPAPELLGGPS |
| | | | | VFLFPPKPKDTLMISRTPEVTCVVVDVSHEDPEVKFN |
| | | | | WYVDGVEVHNAKTKPCEEQYGSTYRCVSVLTVLH |
| | | | | QDWLNGKEYKCKVSNKALPAPIEKTISKAKGQPREP |
| | | | | QVYTLPPSREEMTKNQVSLTCLVKGFYPSDIAVEWE |
| | | | | SNGQPENNYKTTPPVLDSDGSFFLYSKLTVDKSRWQ |
| | | | | QGNVFSCSVMHEALHNHYTQKSLSLSPGK |
| 341. | MU 4-B6 CC x | artificial | aa | SYGMH |
| | I2C0-scFc VH | | | |
| | CDR1 | | | |
| 342. | MU 4-B6 CC x | artificial | aa | VISYDASNKYYASSVKG |
| | I2C0-scFc VH | | | |
| | CDR2 | | | |
| 343. | MU 4-B6 CC x | artificial | aa | GAYTYGFDY |
| | I2C0-scFc VH | | | |
| | CDR3 | | | |
| 344. | MU 4-B6 CC x | artificial | aa | RASQSVNRYLA |
| | I2C0-scFc VL | | | |
| | CDR1 | | | |
| 345. | MU 4-B6 CC x | artificial | aa | GASNRAT |
| | I2C0-scFc VL | | | |
| | CDR2 | | | |
| 346. | MU 4-B6 CC x | artificial | aa | HHYGSSIFA |
| | I2C0-scFc VL | | | |
| | CDR3 | | | |
| 347. | MU 4-B6 CC x | artificial | aa | QVQLVESGGGVVQPGRSLRLSCAASGFTFSSYGMH |
| | I2C0-scFc VH | | | WVRQAPGKCLEWVAVISYDASNKYYASSVKGRFTI |
| | | | | SRDNSKNTLYLQMNSLRAEDTAVYYCARGAYTYGF |
| | | | | DYWGQGTLVTVSS |
| 348. | MU 4-B6 CC x | artificial | aa | EIVLTQSPGTLSLSPGERATLSCRASQSVNRYLAWY |
| | I2C0-scFc VL | | | QQKPGQAPRLLIYGASNRATGIPDRFTGSGSGTDFTL |
| | | | | TISRLEPEDFAVYFCHHYGSSIFAFGCGTKVEIK |
| 349. | MU 4-B6 CC x | artificial | aa | QVQLVESGGGVVQPGRSLRLSCAASGFTFSSYGMH |
| | I2C0-scFc scFv | | | WVRQAPGKCLEWVAVISYDASNKYYASSVKGRFTI |
| | | | | SRDNSKNTLYLQMNSLRAEDTAVYYCARGAYTYGF |
| | | | | DYWGQGTLVTVSSGGGGSGGGGSGGGGSEIVLTQS |
| | | | | PGTLSLSPGERATLSCRASQSVNRYLAWYQQKPGQ |
| | | | | APRLLIYGASNRATGIPDRFTGSGSGTDFTLTISRLEP |
| | | | | EDFAVYFCHHYGSSIFAFGCGTKVEIK |
| 350. | MU 4-B6 CC x | artificial | aa | QVQLVESGGGVVQPGRSLRLSCAASGFTFSSYGMH |
| | I2C0-scFc | | | WVRQAPGKCLEWVAVISYDASNKYYASSVKGRFTI |
| | Bispecific molecule | | | SRDNSKNTLYLQMNSLRAEDTAVYYCARGAYTYGF |
| | | | | DYWGQGTLVTVSSGGGGSGGGGSGGGGSEIVLTQS |
| | | | | PGTLSLSPGERATLSCRASQSVNRYLAWYQQKPGQ |
| | | | | APRLLIYGASNRATGIPDRFTGSGSGTDFTLTISRLEP |
| | | | | EDFAVYFCHHYGSSIFAFGCGTKVEIKSGGGGSEVQ |
| | | | | LVESGGGLVQPGGSLKLSCAASGFTFNKYAMNWVR |
| | | | | QAPGKGLEWVARIRSKYNNYATYYADSVKDRFTIS |
| | | | | RDDSKNTAYLQMNNLKTEDTAVYYCVRHGNFGNS |
| | | | | YISYWAYWGQGTLVTVSSGGGGSGGGGSGGGGSQ |
| | | | | TVVTQEPSLTVSPGGTVTLTCGSSTGAVTSGNYPNW |
| | | | | VQQKPGQAPRGLIGGTKFLAPGTPARFSGSLLGGKA |
| | | | | ALTLSGVQPEDEAEYYCVLWYSNRWVFGGGTKLTV |
| | | | | L |
| 351. | MU 4-B6 CC x | artificial | aa | QVQLVESGGGVVQPGRSLRLSCAASGFTFSSYGMH |
| | I2C0-scFc | | | WVRQAPGKCLEWVAVISYDASNKYYASSVKGRFTI |
| | Bispecific HLE | | | SRDNSKNTLYLQMNSLRAEDTAVYYCARGAYTYGF |
| | molecule | | | DYWGQGTLVTVSSGGGGSGGGGSGGGGSEIVLTQS |
| | | | | PGTLSLSPGERATLSCRASQSVNRYLAWYQQKPGQ |
| | | | | APRLLIYGASNRATGIPDRFTGSGSGTDFTLTISRLEP |
| | | | | EDFAVYFCHHYGSSIFAFGCGTKVEIKSGGGGSEVQ |
| | | | | LVESGGGLVQPGGSLKLSCAASGFTFNKYAMNWVR |
| | | | | QAPGKGLEWVARIRSKYNNYATYYADSVKDRFTIS |
| | | | | RDDSKNTAYLQMNNLKTEDTAVYYCVRHGNFGNS |
| | | | | YISYWAYWGQGTLVTVSSGGGGSGGGGSGGGGSQ |
| | | | | TVVTQEPSLTVSPGGTVTLTCGSSTGAVTSGNYPNW |
| | | | | VQQKPGQAPRGLIGGTKFLAPGTPARFSGSLLGGKA |
| | | | | ALTLSGVQPEDEAEYYCVLWYSNRWVFGGGTKLTV |
| | | | | LGGGGDKTHTCPPCPAPELLGGPSVFLFPPKPKDTL |
| | | | | MISRTPEVTCVVVDVSHEDPEVKFNWYVDGVEVHN |
| | | | | AKTKPCEEQYGSTYRCVSVLTVLHQDWLNGKEYKC |
| | | | | KVSNKALPAPIEKTISKAKGQPREPQVYTLPPSREEM |
| | | | | TKNQVSLTCLVKGFYPSDIAVEWESNGQPENNYKTT |
| | | | | PPVLDSDGSFFLYSKLTVDKSRWQQGNVFSCSVMH |
| | | | | EALHNHYTQKSLSLSPGKGGGGSGGGGSGGGGSGG |
| | | | | GGSGGGGSGGGGSDKTHTCPPCPAPELLGGPSVFLF |
| | | | | PPKPKDTLMISRTPEVTCVVVDVSHEDPEVKFNWYV |
| | | | | DGVEVHNAKTKPCEEQYGSTYRCVSVLTVLHQDWL |
| | | | | NGKEYKCKVSNKALPAPIEKTISKAKGQPREPQVYT |
| | | | | LPPSREEMTKNQVSLTCLVKGFYPSDIAVEWESNGQ |
| | | | | PENNYKTTPPVLDSDGSFFLYSKLTVDKSRWQQGN |
| | | | | VFSCSVMHEALHNHYTQKSLSLSPGK |
| 352. | MU 4-B1 CC x | artificial | aa | NFGMH |
| | I2C0-scFc VH | | | |
| | CDR1 | | | |
| 353. | MU 4-B1 CC x | artificial | aa | VIWFDASKTYYAESVKG |
| | I2C0-scFc VH | | | |
| | CDR2 | | | |
| 354. | MU 4-B1 CC x | artificial | aa | ATYSTGWSYFDY |
| | I2C0-scFc VH | | | |
| | CDR3 | | | |
| 355. | MU 4-B1 CC x | artificial | aa | SGDKLGDKYTS |
| | I2C0-scFc VL | | | |
| | CDR1 | | | |
| 356. | MU 4-B1 CC x | artificial | aa | HDAKRPS |
| | I2C0-scFc VL | | | |
| | CDR2 | | | |
| 357. | MU 4-B1 CC x | artificial | aa | QAWSASTAWV |
| | I2C0-scFc VL | | | |
| | CDR3 | | | |
| 358. | MU 4-B1 CC x | artificial | aa | QVQLVESGGGVVQPGRSLRLSCAASGFTFSNFGMH |
| | I2C0-scFc VH | | | WVRQAPGKCLEWVAVIWFDASKTYYAESVKGRFTI |
| | | | | SRDTSMNTLYLQMNSLRAEDTAVYYCARATYSTG |
| | | | | WSYFDYWGQGTLVTVSS |
| 359. | MU 4-B1 CC x | artificial | aa | SYELTQPPSVSVSPGQTASITCSGDKLGDKYTSWYQ |
| | I2C0-scFc VL | | | QKPGQSPVLVIYHDAKRPSGIPERFSGSNSGNTATLTI |
| | | | | SGTQAMDEADYYCQAWSASTAWVFGCGTKLTVL |
| 360. | MU 4-B1 CC x | artificial | aa | QVQLVESGGGVVQPGRSLRLSCAASGFTFSNFGMH |
| | I2C0-scFc scFv | | | WVRQAPGKCLEWVAVIWFDASKTYYAESVKGRFTI |
| | | | | SRDTSMNTLYLQMNSLRAEDTAVYYCARATYSTG |
| | | | | WSYFDYWGQGTLVTVSSGGGGSGGGGSGGGGSSY |
| | | | | ELTQPPSVSVSPGQTASITCSGDKLGDKYTSWYQQK |
| | | | | PGQSPVLVIYHDAKRPSGIPERFSGSNSGNTATLTISG |
| | | | | TQAMDEADYYCQAWSASTAWVFGCGTKLTVL |
| 361. | MU 4-B1 CC x | artificial | aa | QVQLVESGGGVVQPGRSLRLSCAASGFTFSNFGMH |
| | I2C0-scFc | | | WVRQAPGKCLEWVAVIWFDASKTYYAESVKGRFTI |
| | Bispecific molecule | | | SRDTSMNTLYLQMNSLRAEDTAVYYCARATYSTG |
| | | | | WSYFDYWGQGTLVTVSSGGGGSGGGGSGGGGSSY |
| | | | | ELTQPPSVSVSPGQTASITCSGDKLGDKYTSWYQQK |
| | | | | PGQSPVLVIYHDAKRPSGIPERFSGSNSGNTATLTISG |
| | | | | TQAMDEADYYCQAWSASTAWVFGCGTKLTVLSGG |
| | | | | GGSEVQLVESGGGLVQPGGSLKLSCAASGFTFNKYA |
| | | | | MNWVRQAPGKGLEWVARIRSKYNNYATYYADSVK |
| | | | | DRFTISRDDSKNTAYLQMNNLKTEDTAVYYCVRHG |
| | | | | NFGNSYISYWAYWGQGTLVTVSSGGGGSGGGGSGG |
| | | | | GGSQTVVTQEPSLTVSPGGTVTLTCGSSTGAVTSGN |
| | | | | YPNWVQQKPGQAPRGLIGGTKFLAPGTPARFSGSLL |
| | | | | GGKAALTLSGVQPEDEAEYYCVLWYSNRWVFGGG |
| | | | | TKLTVL |
| 362. | MU 4-B1 CC x | artificial | aa | QVQLVESGGGVVQPGRSLRLSCAASGFTFSNFGMH |
| | I2C0-scFc | | | WVRQAPGKCLEWVAVIWFDASKTYYAESVKGRFTI |
| | Bispecific HLE | | | SRDTSMNTLYLQMNSLRAEDTAVYYCARATYSTG |
| | molecule | | | WSYFDYWGQGTLVTVSSGGGGSGGGGSGGGGSSY |
| | | | | ELTQPPSVSVSPGQTASITCSGDKLGDKYTSWYQQK |
| | | | | PGQSPVLVIYHDAKRPSGIPERFSGSNSGNTATLTISG |
| | | | | TQAMDEADYYCQAWSASTAWVFGCGTKLTVLSGG |
| | | | | GGSEVQLVESGGGLVQPGGSLKLSCAASGFTFNKYA |
| | | | | MNWVRQAPGKGLEWVARIRSKYNNYATYYADSVK |
| | | | | DRFTISRDDSKNTAYLQMNNLKTEDTAVYYCVRHG |
| | | | | NFGNSYISYWAYWGQGTLVTVSSGGGGSGGGGSGG |
| | | | | GGSQTVVTQEPSLTVSPGGTVTLTCGSSTGAVTSGN |
| | | | | YPNWVQQKPGQAPRGLIGGTKFLAPGTPARFSGSLL |
| | | | | GGKAALTLSGVQPEDEAEYYCVLWYSNRWVFGGG |
| | | | | TKLTVLGGGGDKTHTCPPCPAPELLGGPSVFLFPPKP |
| | | | | KDTLMISRTPEVTCVVVDVSHEDPEVKFNWYVDGV |
| | | | | EVHNAKTKPCEEQYGSTYRCVSVLTVLHQDWLNGK |
| | | | | EYKCKVSNKALPAPIEKTISKAKGQPREPQVYTLPPS |
| | | | | REEMTKNQVSLTCLVKGFYPSDIAVEWESNGQPEN |
| | | | | NYKTTPPVLDSDGSFFLYSKLTVDKSRWQQGNVFSC |
| | | | | SVMHEALHNHYTQKSLSLSPGKGGGGSGGGGSGGG |
| | | | | GSGGGGSGGGGSGGGGSDKTHTCPPCPAPELLGGPS |
| | | | | VFLFPPKPKDTLMISRTPEVTCVVVDVSHEDPEVKFN |
| | | | | WYVDGVEVHNAKTKPCEEQYGSTYRCVSVLTVLH |
| | | | | QDWLNGKEYKCKVSNKALPAPIEKTISKAKGQPREP |
| | | | | QVYTLPPSREEMTKNQVSLTCLVKGFYPSDIAVEWE |
| | | | | SNGQPENNYKTTPPVLDSDGSFFLYSKLTVDKSRWQ |
| | | | | QGNVFSCSVMHEALHNHYTQKSLSLSPGK |
| 363. | MU 4-A8 CC x | artificial | aa | NFGMH |
| | I2C0-scFc VH | | | |
| | CDR1 | | | |
| 364. | MU 4-A8 CC x | artificial | aa | VIWFDASKTYYADAVKG |
| | I2C0-scFc VH | | | |
| | CDR2 | | | |
| 365. | MU 4-A8 CC x | artificial | aa | ATYSTGWSYFDY |
| | I2C0-scFc VH | | | |
| | CDR3 | | | |
| 366. | MU 4-A8 CC x | artificial | aa | SGDKLGDKYTS |
| | I2C0-scFc VL | | | |
| | CDR1 | | | |
| 367. | MU 4-A8 CC x | artificial | aa | HDAKRPS |
| | I2C0-scFc VL | | | |
| | CDR2 | | | |
| 368. | MU 4-A8 CC x | artificial | aa | QAWSASTAWV |
| | I2C0-scFc VL | | | |
| | CDR3 | | | |
| 369. | MU 4-A8 CC x | artificial | aa | QVQLVESGGGVVQPGRSLRLSCAASGFTFSNFGMH |
| | I2C0-scFc VH | | | WVRQAPGKCLEWVAVIWFDASKTYYADAVKGRFT |
| | | | | ISRDTSMNTLYLQMNSLRAEDTAVYYCARATYSTG |
| | | | | WSYFDYWGQGTLVTVSS |
| 370. | MU 4-A8 CC x | artificial | aa | SYELTQPPSVSVSPGQTASITCSGDKLGDKYTSWYQ |
| | I2C0-scFc VL | | | QKPGQSPVLVIYHDAKRPSGIPERFSGSNSGNTATLTI |
| | | | | SGTQAMDEADYYCQAWSASTAWVFGCGTKLTVL |
| 371. | MU 4-A8 CC x | artificial | aa | QVQLVESGGGVVQPGRSLRLSCAASGFTFSNFGMH |
| | I2C0-scFc scFv | | | WVRQAPGKCLEWVAVIWFDASKTYYADAVKGRFT |
| | | | | ISRDTSMNTLYLQMNSLRAEDTAVYYCARATYSTG |
| | | | | WSYFDYWGQGTLVTVSSGGGGSGGGGSGGGGSSY |
| | | | | ELTQPPSVSVSPGQTASITCSGDKLGDKYTSWYQQK |
| | | | | PGQSPVLVIYHDAKRPSGIPERFSGSNSGNTATLTISG |
| | | | | TQAMDEADYYCQAWSASTAWVFGCGTKLTVL |
| 372. | MU 4-A8 CC x | artificial | aa | QVQLVESGGGVVQPGRSLRLSCAASGFTFSNFGMH |
| | I2C0-scFc | | | WVRQAPGKCLEWVAVIWFDASKTYYADAVKGRFT |
| | Bispecific molecule | | | ISRDTSMNTLYLQMNSLRAEDTAVYYCARATYSTG |
| | | | | WSYFDYWGQGTLVTVSSGGGGSGGGGSGGGGSSY |
| | | | | ELTQPPSVSVSPGQTASITCSGDKLGDKYTSWYQQK |
| | | | | PGQSPVLVIYHDAKRPSGIPERFSGSNSGNTATLTISG |
| | | | | TQAMDEADYYCQAWSASTAWVFGCGTKLTVLSGG |
| | | | | GGSEVQLVESGGGLVQPGGSLKLSCAASGFTFNKYA |
| | | | | MNWVRQAPGKGLEWVARIRSKYNNYATYYADSVK |
| | | | | DRFTISRDDSKNTAYLQMNNLKTEDTAVYYCVRHG |
| | | | | NFGNSYISYWAYWGQGTLVTVSSGGGGSGGGGSGG |
| | | | | GGSQTVVTQEPSLTVSPGGTVTLTCGSSTGAVTSGN |
| | | | | YPNWVQQKPGQAPRGLIGGTKFLAPGTPARFSGSLL |
| | | | | GGKAALTLSGVQPEDEAEYYCVLWYSNRWVFGGG |
| | | | | TKLTVL |
| 373. | MU 4-A8 CC x | artificial | aa | QVQLVESGGGVVQPGRSLRLSCAASGFTFSNFGMH |
| | I2C0-scFc | | | WVRQAPGKCLEWVAVIWFDASKTYYADAVKGRFT |
| | Bispecific HLE | | | ISRDTSMNTLYLQMNSLRAEDTAVYYCARATYSTG |
| | molecule | | | WSYFDYWGQGTLVTVSSGGGGSGGGGSGGGGSSY |
| | | | | ELTQPPSVSVSPGQTASITCSGDKLGDKYTSWYQQK |
| | | | | PGQSPVLVIYHDAKRPSGIPERFSGSNSGNTATLTISG |
| | | | | TQAMDEADYYCQAWSASTAWVFGCGTKLTVLSGG |
| | | | | GGSEVQLVESGGGLVQPGGSLKLSCAASGFTFNKYA |
| | | | | MNWVRQAPGKGLEWVARIRSKYNNYATYYADSVK |
| | | | | DRFTISRDDSKNTAYLQMNNLKTEDTAVYYCVRHG |
| | | | | NFGNSYISYWAYWGQGTLVTVSSGGGGSGGGGSGG |
| | | | | GGSQTVVTQEPSLTVSPGGTVTLTCGSSTGAVTSGN |
| | | | | YPNWVQQKPGQAPRGLIGGTKFLAPGTPARFSGSLL |
| | | | | GGKAALTLSGVQPEDEAEYYCVLWYSNRWVFGGG |
| | | | | TKLTVLGGGGDKTHTCPPCPAPELLGGPSVFLFPPKP |
| | | | | KDTLMISRTPEVTCVVVDVSHEDPEVKFNWYVDGV |
| | | | | EVHNAKTKPCEEQYGSTYRCVSVLTVLHQDWLNGK |
| | | | | EYKCKVSNKALPAPIEKTISKAKGQPREPQVYTLPPS |
| | | | | REEMTKNQVSLTCLVKGFYPSDIAVEWESNGQPEN |
| | | | | NYKTTPPVLDSDGSFFLYSKLTVDKSRWQQGNVFSC |
| | | | | SVMHEALHNHYTQKSLSLSPGKGGGGSGGGGSGGG |
| | | | | GSGGGGSGGGGSGGGGSDKTHTCPPCPAPELLGGPS |
| | | | | VFLFPPKPKDTLMISRTPEVTCVVVDVSHEDPEVKFN |
| | | | | WYVDGVEVHNAKTKPCEEQYGSTYRCVSVLTVLH |
| | | | | QDWLNGKEYKCKVSNKALPAPIEKTISKAKGQPREP |
| | | | | QVYTLPPSREEMTKNQVSLTCLVKGFYPSDIAVEWE |
| | | | | SNGQPENNYKTTPPVLDSDGSFFLYSKLTVDKSRWQ |
| | | | | QGNVFSCSVMHEALHNHYTQKSLSLSPGK |
| 374. | MU 3-C10 CC x | artificial | aa | SYGMH |
| | I2C0-scFc VH | | | |
| | CDR1 | | | |
| 375. | MU 3-C10 CC x | artificial | aa | VIWYSGSNKYYATSVKG |
| | I2C0-scFc VH | | | |
| | CDR2 | | | |
| 376. | MU 3-C10 CC x | artificial | aa | GGYTYGFDY |
| | I2C0-scFc VH | | | |
| | CDR3 | | | |
| 377. | MU 3-C10 CC x | artificial | aa | RASQSINRYLA |
| | I2C0-scFc VL | | | |
| | CDR1 | | | |
| 378. | MU 3-C10 CC x | artificial | aa | TASNRAT |
| | I2C0-scFc VL | | | |
| | CDR2 | | | |
| 379. | MU 3-C10 CC x | artificial | aa | HHYGSSIFT |
| | I2C0-scFc VL | | | |
| | CDR3 | | | |
| 380. | MU 3-C10 CC x | artificial | aa | QVQLVESGGGVVKPGRSLRLSCAASGFTFSSYGMH |
| | I2C0-scFc VH | | | WVRQAPGKCLEWVAVIWYSGSNKYYATSVKGRFTI |
| | | | | SRDNSKNTLYLQMNNLRAEDTAVYYCARGGYTYG |
| | | | | FDYWGQGTLVTVSS |
| 381. | MU 3-C10 CC x | artificial | aa | EIVLTQSPGTLSLSPGERATLSCRASQSINRYLAWYQ |
| | I2C0-scFc VL | | | QKPGQAPRLLIYTASNRATGIPDRFSGSGSGTDFTLTI |
| | | | | SRLEPEDFAVYYCHHYGSSIFTFGCGTKVEIK |
| 382. | MU 3-C10 CC x | artificial | aa | QVQLVESGGGVVKPGRSLRLSCAASGFTFSSYGMH |
| | I2C0-scFc scFv | | | WVRQAPGKCLEWVAVIWYSGSNKYYATSVKGRFTI |
| | | | | SRDNSKNTLYLQMNNLRAEDTAVYYCARGGYTYG |
| | | | | FDYWGQGTLVTVSSGGGGSGGGGSGGGGSEIVLTQ |
| | | | | SPGTLSLSPGERATLSCRASQSINRYLAWYQQKPGQ |
| | | | | APRLLIYTASNRATGIPDRFSGSGSGTDFTLTISRLEP |
| | | | | EDFAVYYCHHYGSSIFTFGCGTKVEIK |
| 383. | MU 3-C10 CC x | artificial | aa | QVQLVESGGGVVKPGRSLRLSCAASGFTFSSYGMH |
| | I2C0-scFc | | | WVRQAPGKCLEWVAVIWYSGSNKYYATSVKGRFTI |
| | Bispecific molecule | | | SRDNSKNTLYLQMNNLRAEDTAVYYCARGGYTYG |
| | | | | FDYWGQGTLVTVSSGGGGSGGGGSGGGGSEIVLTQ |
| | | | | SPGTLSLSPGERATLSCRASQSINRYLAWYQQKPGQ |
| | | | | APRLLIYTASNRATGIPDRFSGSGSGTDFTLTISRLEP |
| | | | | EDFAVYYCHHYGSSIFTFGCGTKVEIKSGGGGSEVQ |
| | | | | LVESGGGLVQPGGSLKLSCAASGFTFNKYAMNWVR |
| | | | | QAPGKGLEWVARIRSKYNNYATYYADSVKDRFTIS |
| | | | | RDDSKNTAYLQMNNLKTEDTAVYYCVRHGNFGNS |
| | | | | YISYWAYWGQGTLVTVSSGGGGSGGGGSGGGGSQ |
| | | | | TVVTQEPSLTVSPGGTVTLTCGSSTGAVTSGNYPNW |
| | | | | VQQKPGQAPRGLIGGTKFLAPGTPARFSGSLLGGKA |
| | | | | ALTLSGVQPEDEAEYYCVLWYSNRWVFGGGTKLTV |
| | | | | L |
| 384. | MU 3-C10 CC x | artificial | aa | QVQLVESGGGVVKPGRSLRLSCAASGFTFSSYGMH |
| | I2C0-scFc | | | WVRQAPGKCLEWVAVIWYSGSNKYYATSVKGRFTI |
| | Bispecific HLE | | | SRDNSKNTLYLQMNNLRAEDTAVYYCARGGYTYG |
| | molecule | | | FDYWGQGTLVTVSSGGGGSGGGGSGGGGSEIVLTQ |
| | | | | SPGTLSLSPGERATLSCRASQSINRYLAWYQQKPGQ |
| | | | | APRLLIYTASNRATGIPDRFSGSGSGTDFTLTISRLEP |
| | | | | EDFAVYYCHHYGSSIFTFGCGTKVEIKSGGGGSEVQ |
| | | | | LVESGGGLVQPGGSLKLSCAASGFTFNKYAMNWVR |
| | | | | QAPGKGLEWVARIRSKYNNYATYYADSVKDRFTIS |
| | | | | RDDSKNTAYLQMNNLKTEDTAVYYCVRHGNFGNS |
| | | | | YISYWAYWGQGTLVTVSSGGGGSGGGGSGGGGSQ |
| | | | | TVVTQEPSLTVSPGGTVTLTCGSSTGAVTSGNYPNW |
| | | | | VQQKPGQAPRGLIGGTKFLAPGTPARFSGSLLGGKA |
| | | | | ALTLSGVQPEDEAEYYCVLWYSNRWVFGGGTKLTV |
| | | | | LGGGGDKTHTCPPCPAPELLGGPSVFLFPPKPKDTL |
| | | | | MISRTPEVTCVVVDVSHEDPEVKFNWYVDGVEVHN |
| | | | | AKTKPCEEQYGSTYRCVSVLTVLHQDWLNGKEYKC |
| | | | | KVSNKALPAPIEKTISKAKGQPREPQVYTLPPSREEM |
| | | | | TKNQVSLTCLVKGFYPSDIAVEWESNGQPENNYKTT |
| | | | | PPVLDSDGSFFLYSKLTVDKSRWQQGNVFSCSVMH |
| | | | | EALHNHYTQKSLSLSPGKGGGGSGGGGSGGGGSGG |
| | | | | GGSGGGGSGGGGSDKTHTCPPCPAPELLGGPSVFLF |
| | | | | PPKPKDTLMISRTPEVTCVVVDVSHEDPEVKFNWYV |
| | | | | DGVEVHNAKTKPCEEQYGSTYRCVSVLTVLHQDWL |
| | | | | NGKEYKCKVSNKALPAPIEKTISKAKGQPREPQVYT |
| | | | | LPPSREEMTKNQVSLTCLVKGFYPSDIAVEWESNGQ |
| | | | | PENNYKTTPPVLDSDGSFFLYSKLTVDKSRWQQGN |
| | | | | VFSCSVMHEALHNHYTQKSLSLSPGK |
| 385. | MU 2-F7 CC x | artificial | aa | SYGMH |
| | I2C0-scFc VH | | | |
| | CDR1 | | | |
| 386. | MU 2-F7 CC x | artificial | aa | VIWFDASNKYYAESVKG |
| | I2C0-scFc VH | | | |
| | CDR2 | | | |
| 387. | MU 2-F7 CC x | artificial | aa | GGYTYGFDY |
| | I2C0-scFc VH | | | |
| | CDR3 | | | |
| 388. | MU 2-F7 CC x | artificial | aa | RASQSINRYLA |
| | I2C0-scFc VL | | | |
| | CDR1 | | | |
| 389. | MU 2-F7 CC x | artificial | aa | TASNRAT |
| | I2C0-scFc VL | | | |
| | CDR2 | | | |
| 390. | MU 2-F7 CC x | artificial | aa | HHYGSSIFT |
| | I2C0-scFc VL | | | |
| | CDR3 | | | |
| 391. | MU 2-F7 CC x | artificial | aa | QVQLVESGGGLVKPGGSLRLSCAASGFTFSSYGMH |
| | I2C0-scFc VH | | | WVRQAPGKCLEWVAVIWFDASNKYYAESVKGRFTI |
| | | | | SRDNSKNTLYLQMNNLRAEDTAVYYCARGGYTYG |
| | | | | FDYWGQGTLVTVSS |
| 392. | MU 2-F7 CC x | artificial | aa | EIVLTQSPGTLSLSPGERATLSCRASQSINRYLAWYQ |
| | I2C0-scFc VL | | | QKPGQAPRLLIYTASNRATGIPDRFSGSGSGTDFTLTI |
| | | | | SRLEPEDFAVYYCHHYGSSIFTFGCGTKVEIK |
| 393. | MU 2-F7 CC x | artificial | aa | QVQLVESGGGLVKPGGSLRLSCAASGFTFSSYGMH |
| | I2C0-scFc scFv | | | WVRQAPGKCLEWVAVIWFDASNKYYAESVKGRFTI |
| | | | | SRDNSKNTLYLQMNNLRAEDTAVYYCARGGYTYG |
| | | | | FDYWGQGTLVTVSSGGGGSGGGGSGGGGSEIVLTQ |
| | | | | SPGTLSLSPGERATLSCRASQSINRYLAWYQQKPGQ |
| | | | | APRLLIYTASNRATGIPDRFSGSGSGTDFTLTISRLEP |
| | | | | EDFAVYYCHHYGSSIFTFGCGTKVEIK |
| 394. | MU 2-F7 CC x | artificial | aa | QVQLVESGGGLVKPGGSLRLSCAASGFTFSSYGMH |
| | I2C0-scFc | | | WVRQAPGKCLEWVAVIWFDASNKYYAESVKGRFTI |
| | Bispecific molecule | | | SRDNSKNTLYLQMNNLRAEDTAVYYCARGGYTYG |
| | | | | FDYWGQGTLVTVSSGGGGSGGGGSGGGGSEIVLTQ |
| | | | | SPGTLSLSPGERATLSCRASQSINRYLAWYQQKPGQ |
| | | | | APRLLIYTASNRATGIPDRFSGSGSGTDFTLTISRLEP |
| | | | | EDFAVYYCHHYGSSIFTFGCGTKVEIKSGGGGSEVQ |
| | | | | LVESGGGLVQPGGSLKLSCAASGFTFNKYAMNWVR |
| | | | | QAPGKGLEWVARIRSKYNNYATYYADSVKDRFTIS |
| | | | | RDDSKNTAYLQMNNLKTEDTAVYYCVRHGNFGNS |
| | | | | YISYWAYWGQGTLVTVSSGGGGSGGGGSGGGGSQ |
| | | | | TVVTQEPSLTVSPGGTVTLTCGSSTGAVTSGNYPNW |
| | | | | VQQKPGQAPRGLIGGTKFLAPGTPARFSGSLLGGKA |
| | | | | ALTLSGVQPEDEAEYYCVLWYSNRWVFGGGTKLTV |
| | | | | L |
| 395. | MU 2-F7 CC x | artificial | aa | QVQLVESGGGLVKPGGSLRLSCAASGFTFSSYGMH |
| | I2C0-scFc | | | WVRQAPGKCLEWVAVIWFDASNKYYAESVKGRFTI |
| | Bispecific HLE | | | SRDNSKNTLYLQMNNLRAEDTAVYYCARGGYTYG |
| | molecule | | | FDYWGQGTLVTVSSGGGGSGGGGSGGGGSEIVLTQ |
| | | | | SPGTLSLSPGERATLSCRASQSINRYLAWYQQKPGQ |
| | | | | APRLLIYTASNRATGIPDRFSGSGSGTDFTLTISRLEP |
| | | | | EDFAVYYCHHYGSSIFTFGCGTKVEIKSGGGGSEVQ |
| | | | | LVESGGGLVQPGGSLKLSCAASGFTFNKYAMNWVR |
| | | | | QAPGKGLEWVARIRSKYNNYATYYADSVKDRFTIS |
| | | | | RDDSKNTAYLQMNNLKTEDTAVYYCVRHGNFGNS |
| | | | | YISYWAYWGQGTLVTVSSGGGGSGGGGSGGGGSQ |
| | | | | TVVTQEPSLTVSPGGTVTLTCGSSTGAVTSGNYPNW |
| | | | | VQQKPGQAPRGLIGGTKFLAPGTPARFSGSLLGGKA |
| | | | | ALTLSGVQPEDEAEYYCVLWYSNRWVFGGGTKLTV |
| | | | | LGGGGDKTHTCPPCPAPELLGGPSVFLFPPKPKDTL |
| | | | | MISRTPEVTCVVVDVSHEDPEVKFNWYVDGVEVHN |
| | | | | AKTKPCEEQYGSTYRCVSVLTVLHQDWLNGKEYKC |
| | | | | KVSNKALPAPIEKTISKAKGQPREPQVYTLPPSREEM |
| | | | | TKNQVSLTCLVKGFYPSDIAVEWESNGQPENNYKTT |
| | | | | PPVLDSDGSFFLYSKLTVDKSRWQQGNVFSCSVMH |
| | | | | EALHNHYTQKSLSLSPGKGGGGSGGGGSGGGGSGG |
| | | | | GGSGGGGSGGGGSDKTHTCPPCPAPELLGGPSVFLF |
| | | | | PPKPKDTLMISRTPEVTCVVVDVSHEDPEVKFNWYV |
| | | | | DGVEVHNAKTKPCEEQYGSTYRCVSVLTVLHQDWL |
| | | | | NGKEYKCKVSNKALPAPIEKTISKAKGQPREPQVYT |
| | | | | LPPSREEMTKNQVSLTCLVKGFYPSDIAVEWESNGQ |
| | | | | PENNYKTTPPVLDSDGSFFLYSKLTVDKSRWQQGN |
| | | | | VFSCSVMHEALHNHYTQKSLSLSPGK |
| 396. | MU 02-E7 CC x | artificial | aa | SYGMH |
| | I2C0-scFc VH | | | |
| | CDR1 | | | |
| 397. | MU 02-E7 CC x | artificial | aa | VIWYTGSNKYYAHSVKG |
| | I2C0-scFc VH | | | |
| | CDR2 | | | |
| 398. | MU 02-E7 CC x | artificial | aa | GAYTYGFDY |
| | I2C0-scFc VH | | | |
| | CDR3 | | | |
| 399. | MU 02-E7 CC x | artificial | aa | RASQSINRYLA |
| | I2C0-scFc VL | | | |
| | CDR1 | | | |
| 400. | MU 02-E7 CC x | artificial | aa | TASNRAT |
| | I2C0-scFc VL | | | |
| | CDR2 | | | |
| 401. | MU 02-E7 CC x | artificial | aa | HHYGSSIFT |
| | I2C0-scFc VL | | | |
| | CDR3 | | | |
| 402. | MU 02-E7 CC x | artificial | aa | QVQLVESGGGVVQPGGSLRLSCAASGFTFSSYGMH |
| | I2C0-scFc VH | | | WVRQAPGKCLEWVAVIWYTGSNKYYAHSVKGRFA |
| | | | | ISRDNSKNTLYLQMNNLRAEDTAVYYCARGAYTYG |
| | | | | FDYWGQGTLVTVSS |
| 403. | MU 02-E7 CC x | artificial | aa | EIVLTQSPGTLSLSPGERATLSCRASQSINRYLAWYQ |
| | I2C0-scFc VL | | | QKPGQAPRLLIYTASNRATGIPDRFSGSGSGTDFTLTI |
| | | | | SRLEPEDFAVYYCHHYGSSIFTFGCGTKVEIK |
| 404. | MU 02-E7 CC x | artificial | aa | QVQLVESGGGVVQPGGSLRLSCAASGFTFSSYGMH |
| | I2C0-scFc scFv | | | WVRQAPGKCLEWVAVIWYTGSNKYYAHSVKGRFA |
| | | | | ISRDNSKNTLYLQMNNLRAEDTAVYYCARGAYTYG |
| | | | | FDYWGQGTLVTVSSGGGGSGGGGSGGGGSEIVLTQ |
| | | | | SPGTLSLSPGERATLSCRASQSINRYLAWYQQKPGQ |
| | | | | APRLLIYTASNRATGIPDRFSGSGSGTDFTLTISRLEP |
| | | | | EDFAVYYCHHYGSSIFTFGCGTKVEIK |
| 405. | MU 02-E7 CC x | artificial | aa | QVQLVESGGGVVQPGGSLRLSCAASGFTFSSYGMH |
| | I2C0-scFc | | | WVRQAPGKCLEWVAVIWYTGSNKYYAHSVKGRFA |
| | Bispecific molecule | | | ISRDNSKNTLYLQMNNLRAEDTAVYYCARGAYTYG |
| | | | | FDYWGQGTLVTVSSGGGGSGGGGSGGGGSEIVLTQ |
| | | | | SPGTLSLSPGERATLSCRASQSINRYLAWYQQKPGQ |
| | | | | APRLLIYTASNRATGIPDRFSGSGSGTDFTLTISRLEP |
| | | | | EDFAVYYCHHYGSSIFTFGCGTKVEIKSGGGGSEVQ |
| | | | | LVESGGGLVQPGGSLKLSCAASGFTFNKYAMNWVR |
| | | | | QAPGKGLEWVARIRSKYNNYATYYADSVKDRFTIS |
| | | | | RDDSKNTAYLQMNNLKTEDTAVYYCVRHGNFGNS |
| | | | | YISYWAYWGQGTLVTVSSGGGGSGGGGSGGGGSQ |
| | | | | TVVTQEPSLTVSPGGTVTLTCGSSTGAVTSGNYPNW |
| | | | | VQQKPGQAPRGLIGGTKFLAPGTPARFSGSLLGGKA |
| | | | | ALTLSGVQPEDEAEYYCVLWYSNRWVFGGGTKLTV |
| | | | | L |
| 406. | MU 02-E7 CC x | artificial | aa | QVQLVESGGGVVQPGGSLRLSCAASGFTFSSYGMH |
| | I2C0-scFc | | | WVRQAPGKCLEWVAVIWYTGSNKYYAHSVKGRFA |
| | Bispecific HLE | | | ISRDNSKNTLYLQMNNLRAEDTAVYYCARGAYTYG |
| | molecule | | | FDYWGQGTLVTVSSGGGGSGGGGSGGGGSEIVLTQ |
| | | | | SPGTLSLSPGERATLSCRASQSINRYLAWYQQKPGQ |
| | | | | APRLLIYTASNRATGIPDRFSGSGSGTDFTLTISRLEP |
| | | | | EDFAVYYCHHYGSSIFTFGCGTKVEIKSGGGGSEVQ |
| | | | | LVESGGGLVQPGGSLKLSCAASGFTFNKYAMNWVR |
| | | | | QAPGKGLEWVARIRSKYNNYATYYADSVKDRFTIS |
| | | | | RDDSKNTAYLQMNNLKTEDTAVYYCVRHGNFGNS |
| | | | | YISYWAYWGQGTLVTVSSGGGGSGGGGSGGGGSQ |
| | | | | TVVTQEPSLTVSPGGTVTLTCGSSTGAVTSGNYPNW |
| | | | | VQQKPGQAPRGLIGGTKFLAPGTPARFSGSLLGGKA |
| | | | | ALTLSGVQPEDEAEYYCVLWYSNRWVFGGGTKLTV |
| | | | | LGGGGDKTHTCPPCPAPELLGGPSVFLFPPKPKDTL |
| | | | | MISRTPEVTCVVVDVSHEDPEVKFNWYVDGVEVHN |
| | | | | AKTKPCEEQYGSTYRCVSVLTVLHQDWLNGKEYKC |
| | | | | KVSNKALPAPIEKTISKAKGQPREPQVYTLPPSREEM |
| | | | | TKNQVSLTCLVKGFYPSDIAVEWESNGQPENNYKTT |
| | | | | PPVLDSDGSFFLYSKLTVDKSRWQQGNVFSCSVMH |
| | | | | EALHNHYTQKSLSLSPGKGGGGSGGGGSGGGGSGG |
| | | | | GGSGGGGSGGGGSDKTHTCPPCPAPELLGGPSVFLF |
| | | | | PPKPKDTLMISRTPEVTCVVVDVSHEDPEVKFNWYV |
| | | | | DGVEVHNAKTKPCEEQYGSTYRCVSVLTVLHQDWL |
| | | | | NGKEYKCKVSNKALPAPIEKTISKAKGQPREPQVYT |
| | | | | LPPSREEMTKNQVSLTCLVKGFYPSDIAVEWESNGQ |
| | | | | PENNYKTTPPVLDSDGSFFLYSKLTVDKSRWQQGN |
| | | | | VFSCSVMHEALHNHYTQKSLSLSPGK |
| 407. | MU 2-D11 CC x | artificial | aa | NHGMH |
| | I2C0-scFc VH | | | |
| | CDR1 | | | |
| 408. | MU 2-D11 CC x | artificial | aa | GIWSDASNKYYAEAVKG |
| | I2C0-scFc VH | | | |
| | CDR2 | | | |
| 409. | MU 2-D11 CC x | artificial | aa | ATYTTGWSYFDY |
| | I2C0-scFc VH | | | |
| | CDR3 | | | |
| 410. | MU 2-D11 CC x | artificial | aa | SGDKLGDKYTS |
| | I2C0-scFc VL | | | |
| | CDR1 | | | |
| 411. | MU 2-D11 CC x | artificial | aa | HDRKRPS |
| | I2C0-scFc VL | | | |
| | CDR2 | | | |
| 412. | MU 2-D11 CC x | artificial | aa | QAYDRSTAWV |
| | I2C0-scFc VL | | | |
| | CDR3 | | | |
| 413. | MU 2-D11 CC x | artificial | aa | QVQLVESGGGVVQPGRSLRLSCAASGFTFSNHGMH |
| | I2C0-scFc VH | | | WVRQAPGKCLEWVAGIWSDASNKYYAEAVKGRFT |
| | | | | ISRDTSKNTLYLQMNSLRAEDTAVYYCARATYTTG |
| | | | | WSYFDYWGQGTLVTVSS |
| 414. | MU 2-D11 CC x | artificial | aa | SYELTQSPSVSVSPGQTASITCSGDKLGDKYTSWYQ |
| | I2C0-scFc VL | | | QKPGQSPVLVIYHDRKRPSGIPERFSGSNSGNTATLTI |
| | | | | SGTQAMDEADYYCQAYDRSTAWVFGCGTKLTVL |
| 415. | MU 2-D11 CC x | artificial | aa | QVQLVESGGGVVQPGRSLRLSCAASGFTFSNHGMH |
| | I2C0-scFc scFv | | | WVRQAPGKCLEWVAGIWSDASNKYYAEAVKGRFT |
| | | | | ISRDTSKNTLYLQMNSLRAEDTAVYYCARATYTTG |
| | | | | WSYFDYWGQGTLVTVSSGGGGSGGGGSGGGGSSY |
| | | | | ELTQSPSVSVSPGQTASITCSGDKLGDKYTSWYQQK |
| | | | | PGQSPVLVIYHDRKRPSGIPERFSGSNSGNTATLTISG |
| | | | | TQAMDEADYYCQAYDRSTAWVFGCGTKLTVL |
| 416. | MU 2-D11 CC x | artificial | aa | QVQLVESGGGVVQPGRSLRLSCAASGFTFSNHGMH |
| | I2C0-scFc | | | WVRQAPGKCLEWVAGIWSDASNKYYAEAVKGRFT |
| | Bispecific molecule | | | ISRDTSKNTLYLQMNSLRAEDTAVYYCARATYTTG |
| | | | | WSYFDYWGQGTLVTVSSGGGGSGGGGSGGGGSSY |
| | | | | ELTQSPSVSVSPGQTASITCSGDKLGDKYTSWYQQK |
| | | | | PGQSPVLVIYHDRKRPSGIPERFSGSNSGNTATLTISG |
| | | | | TQAMDEADYYCQAYDRSTAWVFGCGTKLTVLSGG |
| | | | | GGSEVQLVESGGGLVQPGGSLKLSCAASGFTFNKYA |
| | | | | MNWVRQAPGKGLEWVARIRSKYNNYATYYADSVK |
| | | | | DRFTISRDDSKNTAYLQMNNLKTEDTAVYYCVRHG |
| | | | | NFGNSYISYWAYWGQGTLVTVSSGGGGSGGGGSGG |
| | | | | GGSQTVVTQEPSLTVSPGGTVTLTCGSSTGAVTSGN |
| | | | | YPNWVQQKPGQAPRGLIGGTKFLAPGTPARFSGSLL |
| | | | | GGKAALTLSGVQPEDEAEYYCVLWYSNRWVFGGG |
| | | | | TKLTVL |
| 417. | MU 2-D11 CC x | artificial | aa | QVQLVESGGGVVQPGRSLRLSCAASGFTFSNHGMH |
| | I2C0-scFc | | | WVRQAPGKCLEWVAGIWSDASNKYYAEAVKGRFT |
| | Bispecific HLE | | | ISRDTSKNTLYLQMNSLRAEDTAVYYCARATYTTG |
| | molecule | | | WSYFDYWGQGTLVTVSSGGGGSGGGGSGGGGSSY |
| | | | | ELTQSPSVSVSPGQTASITCSGDKLGDKYTSWYQQK |
| | | | | PGQSPVLVIYHDRKRPSGIPERFSGSNSGNTATLTISG |
| | | | | TQAMDEADYYCQAYDRSTAWVFGCGTKLTVLSGG |
| | | | | GGSEVQLVESGGGLVQPGGSLKLSCAASGFTFNKYA |
| | | | | MNWVRQAPGKGLEWVARIRSKYNNYATYYADSVK |
| | | | | DRFTISRDDSKNTAYLQMNNLKTEDTAVYYCVRHG |
| | | | | NFGNSYISYWAYWGQGTLVTVSSGGGGSGGGGSGG |
| | | | | GGSQTVVTQEPSLTVSPGGTVTLTCGSSTGAVTSGN |
| | | | | YPNWVQQKPGQAPRGLIGGTKFLAPGTPARFSGSLL |
| | | | | GGKAALTLSGVQPEDEAEYYCVLWYSNRWVFGGG |
| | | | | TKLTVLGGGGDKTHTCPPCPAPELLGGPSVFLFPPKP |
| | | | | KDTLMISRTPEVTCVVVDVSHEDPEVKFNWYVDGV |
| | | | | EVHNAKTKPCEEQYGSTYRCVSVLTVLHQDWLNGK |
| | | | | EYKCKVSNKALPAPIEKTISKAKGQPREPQVYTLPPS |
| | | | | REEMTKNQVSLTCLVKGFYPSDIAVEWESNGQPEN |
| | | | | NYKTTPPVLDSDGSFFLYSKLTVDKSRWQQGNVFSC |
| | | | | SVMHEALHNHYTQKSLSLSPGKGGGGSGGGGSGGG |
| | | | | GSGGGGSGGGGSGGGGSDKTHTCPPCPAPELLGGPS |
| | | | | VFLFPPKPKDTLMISRTPEVTCVVVDVSHEDPEVKFN |
| | | | | WYVDGVEVHNAKTKPCEEQYGSTYRCVSVLTVLH |
| | | | | QDWLNGKEYKCKVSNKALPAPIEKTISKAKGQPREP |
| | | | | QVYTLPPSREEMTKNQVSLTCLVKGFYPSDIAVEWE |
| | | | | SNGQPENNYKTTPPVLDSDGSFFLYSKLTVDKSRWQ |
| | | | | QGNVFSCSVMHEALHNHYTQKSLSLSPGK |
| 418. | MU 2-C2 CC x | artificial | aa | NHGMH |
| | I2C0-scFc VH | | | |
| | CDR1 | | | |
| 419. | MU 2-C2 CC x | artificial | aa | GIWSEGSNKYYADAVKG |
| | I2C0-scFc VH | | | |
| | CDR2 | | | |
| 420. | MU 2-C2 CC x | artificial | aa | ATYTTGWSYFDY |
| | I2C0-scFc VH | | | |
| | CDR3 | | | |
| 421. | MU 2-C2 CC x | artificial | aa | SGDKLGDKYAS |
| | I2C0-scFc VL | | | |
| | CDR1 | | | |
| 422. | MU 2-C2 CC x | artificial | aa | QDAKRPS |
| | I2C0-scFc VL | | | |
| | CDR2 | | | |
| 423. | MU 2-C2 CC x | artificial | aa | QAFHQSTWV |
| | I2C0-scFc VL | | | |
| | CDR3 | | | |
| 424. | MU 2-C2 CC x | artificial | aa | QVQLVESGGGVVQPGRSLRLSCAASGFTFSNHGMH |
| | I2C0-scFc VH | | | WVRQAPGKCLEWVAGIWSEGSNKYYADAVKGRFT |
| | | | | ISRDNSKNTLYLQMNSLRAEDTAVYYCARATYTTG |
| | | | | WSYFDYWGQGTLVTVSS |
| 425. | MU 2-C2 CC x | artificial | aa | SYELTQPPSVSVSPGQTASITCSGDKLGDKYASWYQ |
| | I2C0-scFc VL | | | QKSGQSPVLVIYQDAKRPSGIPERFSGSNSGNTATLTI |
| | | | | SGTQAMDEADYYCQAFHQSTWVFGCGTQLTVL |
| 426. | MU 2-C2 CC x | artificial | aa | QVQLVESGGGVVQPGRSLRLSCAASGFTFSNHGMH |
| | I2C0-scFc scFv | | | WVRQAPGKCLEWVAGIWSEGSNKYYADAVKGRFT |
| | | | | ISRDNSKNTLYLQMNSLRAEDTAVYYCARATYTTG |
| | | | | WSYFDYWGQGTLVTVSSGGGGSGGGGSGGGGSSY |
| | | | | ELTQPPSVSVSPGQTASITCSGDKLGDKYASWYQQK |
| | | | | SGQSPVLVIYQDAKRPSGIPERFSGSNSGNTATLTISG |
| | | | | TQAMDEADYYCQAFHQSTWVFGCGTQLTVL |
| 427. | MU 2-C2 CC x | artificial | aa | QVQLVESGGGVVQPGRSLRLSCAASGFTFSNHGMH |
| | I2C0-scFc | | | WVRQAPGKCLEWVAGIWSEGSNKYYADAVKGRFT |
| | Bispecific molecule | | | ISRDNSKNTLYLQMNSLRAEDTAVYYCARATYTTG |
| | | | | WSYFDYWGQGTLVTVSSGGGGSGGGGSGGGGSSY |
| | | | | ELTQPPSVSVSPGQTASITCSGDKLGDKYASWYQQK |
| | | | | SGQSPVLVIYQDAKRPSGIPERFSGSNSGNTATLTISG |
| | | | | TQAMDEADYYCQAFHQSTWVFGCGTQLTVLSGGG |
| | | | | GSEVQLVESGGGLVQPGGSLKLSCAASGFTFNKYA |
| | | | | MNWVRQAPGKGLEWVARIRSKYNNYATYYADSVK |
| | | | | DRFTISRDDSKNTAYLQMNNLKTEDTAVYYCVRHG |
| | | | | NFGNSYISYWAYWGQGTLVTVSSGGGGSGGGGSGG |
| | | | | GGSQTVVTQEPSLTVSPGGTVTLTCGSSTGAVTSGN |
| | | | | YPNWVQQKPGQAPRGLIGGTKFLAPGTPARFSGSLL |
| | | | | GGKAALTLSGVQPEDEAEYYCVLWYSNRWVFGGG |
| | | | | TKLTVL |
| 428. | MU 2-C2 CC x | artificial | aa | QVQLVESGGGVVQPGRSLRLSCAASGFTFSNHGMH |
| | I2C0-scFc | | | WVRQAPGKCLEWVAGIWSEGSNKYYADAVKGRFT |
| | Bispecific HLE | | | ISRDNSKNTLYLQMNSLRAEDTAVYYCARATYTTG |
| | molecule | | | WSYFDYWGQGTLVTVSSGGGGSGGGGSGGGGSSY |
| | | | | ELTQPPSVSVSPGQTASITCSGDKLGDKYASWYQQK |
| | | | | SGQSPVLVIYQDAKRPSGIPERFSGSNSGNTATLTISG |
| | | | | TQAMDEADYYCQAFHQSTWVFGCGTQLTVLSGGG |
| | | | | GSEVQLVESGGGLVQPGGSLKLSCAASGFTFNKYA |
| | | | | MNWVRQAPGKGLEWVARIRSKYNNYATYYADSVK |
| | | | | DRFTISRDDSKNTAYLQMNNLKTEDTAVYYCVRHG |
| | | | | NFGNSYISYWAYWGQGTLVTVSSGGGGSGGGGSGG |
| | | | | GGSQTVVTQEPSLTVSPGGTVTLTCGSSTGAVTSGN |
| | | | | YPNWVQQKPGQAPRGLIGGTKFLAPGTPARFSGSLL |
| | | | | GGKAALTLSGVQPEDEAEYYCVLWYSNRWVFGGG |
| | | | | TKLTVLGGGGDKTHTCPPCPAPELLGGPSVFLFPPKP |
| | | | | KDTLMISRTPEVTCVVVDVSHEDPEVKFNWYVDGV |
| | | | | EVHNAKTKPCEEQYGSTYRCVSVLTVLHQDWLNGK |
| | | | | EYKCKVSNKALPAPIEKTISKAKGQPREPQVYTLPPS |
| | | | | REEMTKNQVSLTCLVKGFYPSDIAVEWESNGQPEN |
| | | | | NYKTTPPVLDSDGSFFLYSKLTVDKSRWQQGNVFSC |
| | | | | SVMHEALHNHYTQKSLSLSPGKGGGGSGGGGSGGG |
| | | | | GSGGGGSGGGGSGGGGSDKTHTCPPCPAPELLGGPS |
| | | | | VFLFPPKPKDTLMISRTPEVTCVVVDVSHEDPEVKFN |
| | | | | WYVDGVEVHNAKTKPCEEQYGSTYRCVSVLTVLH |
| | | | | QDWLNGKEYKCKVSNKALPAPIEKTISKAKGQPREP |
| | | | | QVYTLPPSREEMTKNQVSLTCLVKGFYPSDIAVEWE |
| | | | | SNGQPENNYKTTPPVLDSDGSFFLYSKLTVDKSRWQ |
| | | | | QGNVFSCSVMHEALHNHYTQKSLSLSPGK |
| 429. | MU 2-A3 CC x | artificial | aa | SFGMH |
| | I2C0-scFc VH | | | |
| | CDR1 | | | |
| 430. | MU 2-A3 CC x | artificial | aa | VIWFDASNKYYAESVKG |
| | I2C0-scFc VH | | | |
| | CDR2 | | | |
| 431. | MU 2-A3 CC x | artificial | aa | GGYTYGFDY |
| | I2C0-scFc VH | | | |
| | CDR3 | | | |
| 432. | MU 2-A3 CC x | artificial | aa | RASQAINRYLA |
| | I2C0-scFc VL | | | |
| | CDR1 | | | |
| 433. | MU 2-A3 CC x | artificial | aa | GASSRAT |
| | I2C0-scFc VL | | | |
| | CDR2 | | | |
| 434. | MU 2-A3 CC x | artificial | aa | QHYGSSIFT |
| | I2C0-scFc VL | | | |
| | CDR3 | | | |
| 435. | MU 2-A3 CC x | artificial | aa | QVQLVESGGGVVQPGRSLRLSCAASGFTFSSFGMH |
| | I2C0-scFc VH | | | WVRQAPGKCLEWVAVIWFDASNKYYAESVKGRFTI |
| | | | | SRDNSKNTLYLQMNSLRAEDTAVYYCARGGYTYGF |
| | | | | DYWGQGTLVTVSS |
| 436. | MU 2-A3 CC x | artificial | aa | EIVLTQSPGTLSVSPGERATLSCRASQAINRYLAWYQ |
| | I2C0-scFc | | | QKPGQAPRLLIYGASSRATGIPDRFSGSGSGTDFTLTI |
| | | | | SRLEPEDFAVYYCQHYGSSIFTFGCGTKVEIK |
| 437. | MU 2-A3 CC x | artificial | aa | QVQLVESGGGVVQPGRSLRLSCAASGFTFSSFGMH |
| | I2C0-scFc scFv VL | | | WVRQAPGKCLEWVAVIWFDASNKYYAESVKGRFTI |
| | | | | SRDNSKNTLYLQMNSLRAEDTAVYYCARGGYTYGF |
| | | | | DYWGQGTLVTVSSGGGGSGGGGSGGGGSEIVLTQS |
| | | | | PGTLSVSPGERATLSCRASQAINRYLAWYQQKPGQA |
| | | | | PRLLIYGASSRATGIPDRFSGSGSGTDFTLTISRLEPED |
| | | | | FAVYYCQHYGSSIFTFGCGTKVEIK |
| 438. | MU 2-A3 CC x | artificial | aa | QVQLVESGGGVVQPGRSLRLSCAASGFTFSSFGMH |
| | I2C0-scFc | | | WVRQAPGKCLEWVAVIWFDASNKYYAESVKGRFTI |
| | Bispecific molecule | | | SRDNSKNTLYLQMNSLRAEDTAVYYCARGGYTYGF |
| | | | | DYWGQGTLVTVSSGGGGSGGGGSGGGGSEIVLTQS |
| | | | | PGTLSVSPGERATLSCRASQAINRYLAWYQQKPGQA |
| | | | | PRLLIYGASSRATGIPDRFSGSGSGTDFTLTISRLEPED |
| | | | | FAVYYCQHYGSSIFTFGCGTKVEIKSGGGGSEVQLV |
| | | | | ESGGGLVQPGGSLKLSCAASGFTFNKYAMNWVRQA |
| | | | | PGKGLEWVARIRSKYNNYATYYADSVKDRFTISRD |
| | | | | DSKNTAYLQMNNLKTEDTAVYYCVRHGNFGNSYIS |
| | | | | YWAYWGQGTLVTVSSGGGGSGGGGSGGGGSQTVV |
| | | | | TQEPSLTVSPGGTVTLTCGSSTGAVTSGNYPNWVQQ |
| | | | | KPGQAPRGLIGGTKFLAPGTPARFSGSLLGGKAALT |
| | | | | LSGVQPEDEAEYYCVLWYSNRWVFGGGTKLTVL |
| 439. | MU 2-A3 CC x | artificial | aa | QVQLVESGGGVVQPGRSLRLSCAASGFTFSSFGMH |
| | I2C0-scFc | | | WVRQAPGKCLEWVAVIWFDASNKYYAESVKGRFTI |
| | Bispecific HLE | | | SRDNSKNTLYLQMNSLRAEDTAVYYCARGGYTYGF |
| | molecule | | | DYWGQGTLVTVSSGGGGSGGGGSGGGGSEIVLTQS |
| | | | | PGTLSVSPGERATLSCRASQAINRYLAWYQQKPGQA |
| | | | | PRLLIYGASSRATGIPDRFSGSGSGTDFTLTISRLEPED |
| | | | | FAVYYCQHYGSSIFTFGCGTKVEIKSGGGGSEVQLV |
| | | | | ESGGGLVQPGGSLKLSCAASGFTFNKYAMNWVRQA |
| | | | | PGKGLEWVARIRSKYNNYATYYADSVKDRFTISRD |
| | | | | DSKNTAYLQMNNLKTEDTAVYYCVRHGNFGNSYIS |
| | | | | YWAYWGQGTLVTVSSGGGGSGGGGSGGGGSQTVV |
| | | | | TQEPSLTVSPGGTVTLTCGSSTGAVTSGNYPNWVQQ |
| | | | | KPGQAPRGLIGGTKFLAPGTPARFSGSLLGGKAALT |
| | | | | LSGVQPEDEAEYYCVLWYSNRWVFGGGTKLTVLG |
| | | | | GGGDKTHTCPPCPAPELLGGPSVFLFPPKPKDTLMIS |
| | | | | RTPEVTCVVVDVSHEDPEVKFNWYVDGVEVHNAK |
| | | | | TKPCEEQYGSTYRCVSVLTVLHQDWLNGKEYKCKV |
| | | | | SNKALPAPIEKTISKAKGQPREPQVYTLPPSREEMTK |
| | | | | NQVSLTCLVKGFYPSDIAVEWESNGQPENNYKTTPP |
| | | | | VLDSDGSFFLYSKLTVDKSRWQQGNVFSCSVMHEA |
| | | | | LHNHYTQKSLSLSPGKGGGGSGGGGSGGGGSGGGG |
| | | | | SGGGGSGGGGSDKTHTCPPCPAPELLGGPSVFLFPPK |
| | | | | PKDTLMISRTPEVTCVVVDVSHEDPEVKFNWYVDG |
| | | | | VEVHNAKTKPCEEQYGSTYRCVSVLTVLHQDWLNG |
| | | | | KEYKCKVSNKALPAPIEKTISKAKGQPREPQVYTLPP |
| | | | | SREEMTKNQVSLTCLVKGFYPSDIAVEWESNGQPEN |
| | | | | NYKTTPPVLDSDGSFFLYSKLTVDKSRWQQGNVFSC |
| | | | | SVMHEALHNHYTQKSLSLSPGK |
| 440. | MU 1-H2 CC x | artificial | aa | SYGMH |
| | I2C0-scFc VH | | | |
| | CDR1 | | | |
| 441. | MU 1-H2 CC x | artificial | aa | VIWYDASNKYYATSVKG |
| | I2C0-scFc VH | | | |
| | CDR2 | | | |
| 442. | MU 1-H2 CC x | artificial | aa | GGYTYGFDY |
| | I2C0-scFc VH | | | |
| | CDR3 | | | |
| 443. | MU 1-H2 CC x | artificial | aa | RASQSINRYLA |
| | I2C0-scFc VL | | | |
| | CDR1 | | | |
| 444. | MU 1-H2 CC x | artificial | aa | TASNRAT |
| | I2C0-scFc VL | | | |
| | CDR2 | | | |
| 445. | MU 1-H2 CC x | artificial | aa | HHYGSSIFT |
| | I2C0-scFc VL | | | |
| | CDR3 | | | |
| 446. | MU 1-H2 CC x | artificial | aa | QVQLVESGGGLVKPGGSLRLSCAASGFTFSSYGMH |
| | I2C0-scFc VH | | | WVRQAPGKCLEWVAVIWYDASNKYYATSVKGRFT |
| | | | | ISRDNSKNTLYLQMNNLRAEDTAVYYCARGGYTYG |
| | | | | FDYWGQGTLVTVSS |
| 447. | MU 1-H2 CC x | artificial | aa | EIVLTQSPGTLSLSPGERATLSCRASQSINRYLAWYQ |
| | I2C0-scFc VL | | | QKPGQAPRLLIYTASNRATGIPDRFSGSGSGTDFTLTI |
| | | | | SRLEPEDFAVYYCHHYGSSIFTFGCGTKVEIK |
| 448. | MU 1-H2 CC x | artificial | aa | QVQLVESGGGLVKPGGSLRLSCAASGFTFSSYGMH |
| | I2C0-scFc scFv | | | WVRQAPGKCLEWVAVIWYDASNKYYATSVKGRFT |
| | | | | ISRDNSKNTLYLQMNNLRAEDTAVYYCARGGYTYG |
| | | | | FDYWGQGTLVTVSSGGGGSGGGGSGGGGSEIVLTQ |
| | | | | SPGTLSLSPGERATLSCRASQSINRYLAWYQQKPGQ |
| | | | | APRLLIYTASNRATGIPDRFSGSGSGTDFTLTISRLEP |
| | | | | EDFAVYYCHHYGSSIFTFGCGTKVEIK |
| 449. | MU 1-H2 CC x | artificial | aa | QVQLVESGGGLVKPGGSLRLSCAASGFTFSSYGMH |
| | I2C0-scFc | | | WVRQAPGKCLEWVAVIWYDASNKYYATSVKGRFT |
| | Bispecific molecule | | | ISRDNSKNTLYLQMNNLRAEDTAVYYCARGGYTYG |
| | | | | FDYWGQGTLVTVSSGGGGSGGGGSGGGGSEIVLTQ |
| | | | | SPGTLSLSPGERATLSCRASQSINRYLAWYQQKPGQ |
| | | | | APRLLIYTASNRATGIPDRFSGSGSGTDFTLTISRLEP |
| | | | | EDFAVYYCHHYGSSIFTFGCGTKVEIKSGGGGSEVQ |
| | | | | LVESGGGLVQPGGSLKLSCAASGFTFNKYAMNWVR |
| | | | | QAPGKGLEWVARIRSKYNNYATYYADSVKDRFTIS |
| | | | | RDDSKNTAYLQMNNLKTEDTAVYYCVRHGNFGNS |
| | | | | YISYWAYWGQGTLVTVSSGGGGSGGGGSGGGGSQ |
| | | | | TVVTQEPSLTVSPGGTVTLTCGSSTGAVTSGNYPNW |
| | | | | VQQKPGQAPRGLIGGTKFLAPGTPARFSGSLLGGKA |
| | | | | ALTLSGVQPEDEAEYYCVLWYSNRWVFGGGTKLTV |
| | | | | L |
| 450. | MU 1-H2 CC x | artificial | aa | QVQLVESGGGLVKPGGSLRLSCAASGFTFSSYGMH |
| | I2C0-scFc | | | WVRQAPGKCLEWVAVIWYDASNKYYATSVKGRFT |
| | Bispecific HLE | | | ISRDNSKNTLYLQMNNLRAEDTAVYYCARGGYTYG |
| | molecule | | | FDYWGQGTLVTVSSGGGGSGGGGSGGGGSEIVLTQ |
| | | | | SPGTLSLSPGERATLSCRASQSINRYLAWYQQKPGQ |
| | | | | APRLLIYTASNRATGIPDRFSGSGSGTDFTLTISRLEP |
| | | | | EDFAVYYCHHYGSSIFTFGCGTKVEIKSGGGGSEVQ |
| | | | | LVESGGGLVQPGGSLKLSCAASGFTFNKYAMNWVR |
| | | | | QAPGKGLEWVARIRSKYNNYATYYADSVKDRFTIS |
| | | | | RDDSKNTAYLQMNNLKTEDTAVYYCVRHGNFGNS |
| | | | | YISYWAYWGQGTLVTVSSGGGGSGGGGSGGGGSQ |
| | | | | TVVTQEPSLTVSPGGTVTLTCGSSTGAVTSGNYPNW |
| | | | | VQQKPGQAPRGLIGGTKFLAPGTPARFSGSLLGGKA |
| | | | | ALTLSGVQPEDEAEYYCVLWYSNRWVFGGGTKLTV |
| | | | | LGGGGDKTHTCPPCPAPELLGGPSVFLFPPKPKDTL |
| | | | | MISRTPEVTCVVVDVSHEDPEVKFNWYVDGVEVHN |
| | | | | AKTKPCEEQYGSTYRCVSVLTVLHQDWLNGKEYKC |
| | | | | KVSNKALPAPIEKTISKAKGQPREPQVYTLPPSREEM |
| | | | | TKNQVSLTCLVKGFYPSDIAVEWESNGQPENNYKTT |
| | | | | PPVLDSDGSFFLYSKLTVDKSRWQQGNVFSCSVMH |
| | | | | EALHNHYTQKSLSLSPGKGGGGSGGGGSGGGGSGG |
| | | | | GGSGGGGSGGGGSDKTHTCPPCPAPELLGGPSVFLF |
| | | | | PPKPKDTLMISRTPEVTCVVVDVSHEDPEVKFNWYV |
| | | | | DGVEVHNAKTKPCEEQYGSTYRCVSVLTVLHQDWL |
| | | | | NGKEYKCKVSNKALPAPIEKTISKAKGQPREPQVYT |
| | | | | LPPSREEMTKNQVSLTCLVKGFYPSDIAVEWESNGQ |
| | | | | PENNYKTTPPVLDSDGSFFLYSKLTVDKSRWQQGN |
| | | | | VFSCSVMHEALHNHYTQKSLSLSPGK |
| 451. | MU 1-E9 CC x | artificial | aa | SYGMH |
| | I2C0-scFc VH | | | |
| | CDR1 | | | |
| 452. | MU 1-E9 CC x | artificial | aa | VIWFHGSNKYYAESVKG |
| | I2C0-scFc VH | | | |
| | CDR2 | | | |
| 453. | MU 1-E9 CC x | artificial | aa | GAYTYGFDY |
| | I2C0-scFc VH | | | |
| | CDR3 | | | |
| 454. | MU 1-E9 CC x | artificial | aa | RASQSINRYLA |
| | I2C0-scFc VL | | | |
| | CDR1 | | | |
| 455. | MU 1-E9 CC x | artificial | aa | TASNRAT |
| | I2C0-scFc VL | | | |
| | CDR2 | | | |
| 456. | MU 1-E9 CC x | artificial | aa | HHYGSSIFT |
| | I2C0-scFc VL | | | |
| | CDR3 | | | |
| 457. | MU 1-E9 CC x | artificial | aa | QVQLVESGGGVVKPGRSLRLSCAASGFTFSSYGMH |
| | I2C0-scFc VH | | | WVRQAPGKCLEWVAVIWFHGSNKYYAESVKGRFTI |
| | | | | SRDNSKNTLYLQMNNLRAEDTAVYYCARGAYTYG |
| | | | | FDYWGQGTLVTVSS |
| 458. | MU 1-E9 CC x | artificial | aa | EIVLTQSPGTLSLSPGERATLSCRASQSINRYLAWYQ |
| | I2C0-scFc VL | | | QKPGQAPRLLIYTASNRATGIPDRFSGSGSGTDFTLTI |
| | | | | SRLEPEDFAVYYCHHYGSSIFTFGCGTKVEIK |
| 459. | MU 1-E9 CC x | artificial | aa | QVQLVESGGGVVKPGRSLRLSCAASGFTFSSYGMH |
| | I2C0-scFc scFv | | | WVRQAPGKCLEWVAVIWFHGSNKYYAESVKGRFTI |
| | | | | SRDNSKNTLYLQMNNLRAEDTAVYYCARGAYTYG |
| | | | | FDYWGQGTLVTVSSGGGGSGGGGSGGGGSEIVLTQ |
| | | | | SPGTLSLSPGERATLSCRASQSINRYLAWYQQKPGQ |
| | | | | APRLLIYTASNRATGIPDRFSGSGSGTDFTLTISRLEP |
| | | | | EDFAVYYCHHYGSSIFTFGCGTKVEIK |
| 460. | MU 1-E9 CC x | artificial | aa | QVQLVESGGGVVKPGRSLRLSCAASGFTFSSYGMH |
| | I2C0-scFc | | | WVRQAPGKCLEWVAVIWFHGSNKYYAESVKGRFTI |
| | Bispecific molecule | | | SRDNSKNTLYLQMNNLRAEDTAVYYCARGAYTYG |
| | | | | FDYWGQGTLVTVSSGGGGSGGGGSGGGGSEIVLTQ |
| | | | | SPGTLSLSPGERATLSCRASQSINRYLAWYQQKPGQ |
| | | | | APRLLIYTASNRATGIPDRFSGSGSGTDFTLTISRLEP |
| | | | | EDFAVYYCHHYGSSIFTFGCGTKVEIKSGGGGSEVQ |
| | | | | LVESGGGLVQPGGSLKLSCAASGFTFNKYAMNWVR |
| | | | | QAPGKGLEWVARIRSKYNNYATYYADSVKDRFTIS |
| | | | | RDDSKNTAYLQMNNLKTEDTAVYYCVRHGNFGNS |
| | | | | YISYWAYWGQGTLVTVSSGGGGSGGGGSGGGGSQ |
| | | | | TVVTQEPSLTVSPGGTVTLTCGSSTGAVTSGNYPNW |
| | | | | VQQKPGQAPRGLIGGTKFLAPGTPARFSGSLLGGKA |
| | | | | ALTLSGVQPEDEAEYYCVLWYSNRWVFGGGTKLTV |
| | | | | L |
| 461. | MU 1-E9 CC x | artificial | aa | QVQLVESGGGVVKPGRSLRLSCAASGFTFSSYGMH |
| | I2C0-scFc | | | WVRQAPGKCLEWVAVIWFHGSNKYYAESVKGRFTI |
| | Bispecific HLE | | | SRDNSKNTLYLQMNNLRAEDTAVYYCARGAYTYG |
| | molecule | | | FDYWGQGTLVTVSSGGGGSGGGGSGGGGSEIVLTQ |
| | | | | SPGTLSLSPGERATLSCRASQSINRYLAWYQQKPGQ |
| | | | | APRLLIYTASNRATGIPDRFSGSGSGTDFTLTISRLEP |
| | | | | EDFAVYYCHHYGSSIFTFGCGTKVEIKSGGGGSEVQ |
| | | | | LVESGGGLVQPGGSLKLSCAASGFTFNKYAMNWVR |
| | | | | QAPGKGLEWVARIRSKYNNYATYYADSVKDRFTIS |
| | | | | RDDSKNTAYLQMNNLKTEDTAVYYCVRHGNFGNS |
| | | | | YISYWAYWGQGTLVTVSSGGGGSGGGGSGGGGSQ |
| | | | | TVVTQEPSLTVSPGGTVTLTCGSSTGAVTSGNYPNW |
| | | | | VQQKPGQAPRGLIGGTKFLAPGTPARFSGSLLGGKA |
| | | | | ALTLSGVQPEDEAEYYCVLWYSNRWVFGGGTKLTV |
| | | | | LGGGGDKTHTCPPCPAPELLGGPSVFLFPPKPKDTL |
| | | | | MISRTPEVTCVVVDVSHEDPEVKFNWYVDGVEVHN |
| | | | | AKTKPCEEQYGSTYRCVSVLTVLHQDWLNGKEYKC |
| | | | | KVSNKALPAPIEKTISKAKGQPREPQVYTLPPSREEM |
| | | | | TKNQVSLTCLVKGFYPSDIAVEWESNGQPENNYKTT |
| | | | | PPVLDSDGSFFLYSKLTVDKSRWQQGNVFSCSVMH |
| | | | | EALHNHYTQKSLSLSPGKGGGGSGGGGSGGGGSGG |
| | | | | GGSGGGGSGGGGSDKTHTCPPCPAPELLGGPSVFLF |
| | | | | PPKPKDTLMISRTPEVTCVVVDVSHEDPEVKFNWYV |
| | | | | DGVEVHNAKTKPCEEQYGSTYRCVSVLTVLHQDWL |
| | | | | NGKEYKCKVSNKALPAPIEKTISKAKGQPREPQVYT |
| | | | | LPPSREEMTKNQVSLTCLVKGFYPSDIAVEWESNGQ |
| | | | | PENNYKTTPPVLDSDGSFFLYSKLTVDKSRWQQGN |
| | | | | VFSCSVMHEALHNHYTQKSLSLSPGK |
| 462. | MU 1-B10 CC x | artificial | aa | NFGMH |
| | I2C0-scFc VH | | | |
| | CDR1 | | | |
| 463. | MU 1-B10 CC x | artificial | aa | VIWFDASKTYYAEAVKG |
| | I2C0-scFc VH | | | |
| | CDR2 | | | |
| 464. | MU 1-B10 CC x | artificial | aa | ATYSTGWSYFDY |
| | I2C0-scFc VH | | | |
| | CDR3 | | | |
| 465. | MU 1-B10 CC x | artificial | aa | SGDKLGDKYTS |
| | I2C0-scFc VL | | | |
| | CDR1 | | | |
| 466. | MU 1-B10 CC x | artificial | aa | HDAKRPS |
| | I2C0-scFc VL | | | |
| | CDR2 | | | |
| 467. | MU 1-B10 CC x | artificial | aa | QAWSASTAWV |
| | I2C0-scFc VL | | | |
| | CDR3 | | | |
| 468. | MU 1-B10 CC x | artificial | aa | QVQLVESGGGVVQPGRSLRLSCAASGFTFSNFGMH |
| | I2C0-scFc VH | | | WVRQAPGKCLEWVAVIWFDASKTYYAEAVKGRFTI |
| | | | | SRDTSMNTLYLQMNSLRAEDTAVYYCARATYSTG |
| | | | | WSYFDYWGQGTLVTVSS |
| 469. | MU 1-B10 CC x | artificial | aa | SYELTQPPSVSVSPGQTASITCSGDKLGDKYTSWYQ |
| | I2C0-scFc VL | | | QKPGQSPVLVIYHDAKRPSGIPERFSGSNSGNTATLTI |
| | | | | SGTQAMDEADYYCQAWSASTAWVFGCGTKLTVL |
| 470. | MU 1-B10 CC x | artificial | aa | QVQLVESGGGVVQPGRSLRLSCAASGFTFSNFGMH |
| | I2C0-scFc scFv | | | WVRQAPGKCLEWVAVIWFDASKTYYAEAVKGRFTI |
| | | | | SRDTSMNTLYLQMNSLRAEDTAVYYCARATYSTG |
| | | | | WSYFDYWGQGTLVTVSSGGGGSGGGGSGGGGSSY |
| | | | | ELTQPPSVSVSPGQTASITCSGDKLGDKYTSWYQQK |
| | | | | PGQSPVLVIYHDAKRPSGIPERFSGSNSGNTATLTISG |
| | | | | TQAMDEADYYCQAWSASTAWVFGCGTKLTVL |
| 471. | MU 1-B10 CC x | artificial | aa | QVQLVESGGGVVQPGRSLRLSCAASGFTFSNFGMH |
| | I2C0-scFc | | | WVRQAPGKCLEWVAVIWFDASKTYYAEAVKGRFTI |
| | Bispecific molecule | | | SRDTSMNTLYLQMNSLRAEDTAVYYCARATYSTG |
| | | | | WSYFDYWGQGTLVTVSSGGGGSGGGGSGGGGSSY |
| | | | | ELTQPPSVSVSPGQTASITCSGDKLGDKYTSWYQQK |
| | | | | PGQSPVLVIYHDAKRPSGIPERFSGSNSGNTATLTISG |
| | | | | TQAMDEADYYCQAWSASTAWVFGCGTKLTVLSGG |
| | | | | GGSEVQLVESGGGLVQPGGSLKLSCAASGFTFNKYA |
| | | | | MNWVRQAPGKGLEWVARIRSKYNNYATYYADSVK |
| | | | | DRFTISRDDSKNTAYLQMNNLKTEDTAVYYCVRHG |
| | | | | NFGNSYISYWAYWGQGTLVTVSSGGGGSGGGGSGG |
| | | | | GGSQTVVTQEPSLTVSPGGTVTLTCGSSTGAVTSGN |
| | | | | YPNWVQQKPGQAPRGLIGGTKFLAPGTPARFSGSLL |
| | | | | GGKAALTLSGVQPEDEAEYYCVLWYSNRWVFGGG |
| | | | | TKLTVL |
| 472. | MU 1-B10 CC x | artificial | aa | QVQLVESGGGVVQPGRSLRLSCAASGFTFSNFGMH |
| | I2C0-scFc | | | WVRQAPGKCLEWVAVIWFDASKTYYAEAVKGRFTI |
| | Bispecific HLE | | | SRDTSMNTLYLQMNSLRAEDTAVYYCARATYSTG |
| | molecule | | | WSYFDYWGQGTLVTVSSGGGGSGGGGSGGGGSSY |
| | | | | ELTQPPSVSVSPGQTASITCSGDKLGDKYTSWYQQK |
| | | | | PGQSPVLVIYHDAKRPSGIPERFSGSNSGNTATLTISG |
| | | | | TQAMDEADYYCQAWSASTAWVFGCGTKLTVLSGG |
| | | | | GGSEVQLVESGGGLVQPGGSLKLSCAASGFTFNKYA |
| | | | | MNWVRQAPGKGLEWVARIRSKYNNYATYYADSVK |
| | | | | DRFTISRDDSKNTAYLQMNNLKTEDTAVYYCVRHG |
| | | | | NFGNSYISYWAYWGQGTLVTVSSGGGGSGGGGSGG |
| | | | | GGSQTVVTQEPSLTVSPGGTVTLTCGSSTGAVTSGN |
| | | | | YPNWVQQKPGQAPRGLIGGTKFLAPGTPARFSGSLL |
| | | | | GGKAALTLSGVQPEDEAEYYCVLWYSNRWVFGGG |
| | | | | TKLTVLGGGGDKTHTCPPCPAPELLGGPSVFLFPPKP |
| | | | | KDTLMISRTPEVTCVVVDVSHEDPEVKFNWYVDGV |
| | | | | EVHNAKTKPCEEQYGSTYRCVSVLTVLHQDWLNGK |
| | | | | EYKCKVSNKALPAPIEKTISKAKGQPREPQVYTLPPS |
| | | | | REEMTKNQVSLTCLVKGFYPSDIAVEWESNGQPEN |
| | | | | NYKTTPPVLDSDGSFFLYSKLTVDKSRWQQGNVFSC |
| | | | | SVMHEALHNHYTQKSLSLSPGKGGGGSGGGGSGGG |
| | | | | GSGGGGSGGGGSGGGGSDKTHTCPPCPAPELLGGPS |
| | | | | VFLFPPKPKDTLMISRTPEVTCVVVDVSHEDPEVKFN |
| | | | | WYVDGVEVHNAKTKPCEEQYGSTYRCVSVLTVLH |
| | | | | QDWLNGKEYKCKVSNKALPAPIEKTISKAKGQPREP |
| | | | | QVYTLPPSREEMTKNQVSLTCLVKGFYPSDIAVEWE |
| | | | | SNGQPENNYKTTPPVLDSDGSFFLYSKLTVDKSRWQ |
| | | | | QGNVFSCSVMHEALHNHYTQKSLSLSPGK |
| 473. | MU 1-B6 CC x | artificial | aa | GYYWS |
| | I2C0-scFc VH | | | |
| | CDR1 | | | |
| 474. | MU 1-B6 CC x | artificial | aa | DIDYSGSTKYNPSLKS |
| | I2C0-scFc VH | | | |
| | CDR2 | | | |
| 475. | MU 1-B6 CC x | artificial | aa | KKYSTVWSYFDY |
| | I2C0-scFc VH | | | |
| | CDR3 | | | |
| 476. | MU 1-B6 CC x | artificial | aa | SGDKLGDKYAN |
| | I2C0-scFc VL | | | |
| | CDR1 | | | |
| 477. | MU 1-B6 CC x | artificial | aa | HDNKRPS |
| | I2C0-scFc VL | | | |
| | CDR2 | | | |
| 478. | MU 1-B6 CC x | artificial | aa | QAYGISSAV |
| | I2C0-scFc VL | | | |
| | CDR3 | | | |
| 479. | MU 1-B6 CC x | artificial | aa | QVQLQQWGAGLLKPSETLSLTCAVYGGSFSGYYWS |
| | I2C0-scFc VH | | | WIRQPPGKCLEWIGDIDYSGSTKYNPSLKSRVTISLD |
| | | | | TSKNQFSLKLNSVTAADTAVYFCARKKYSTVWSYF |
| | | | | DYWGQGTLVTVSS |
| 480. | MU 1-B6 CC x | artificial | aa | SYELTQPASASVSPGQTASITCSGDKLGDKYANWYQ |
| | I2C0-scFc VL | | | QKPGQSPILVIYHDNKRPSGIPERFSGSNSGNTATLTI |
| | | | | SGTQAMDEADYYCQAYGISSAVFGCGTKLTVL |
| 481. | MU 1-B6 CC x | artificial | aa | QVQLQQWGAGLLKPSETLSLTCAVYGGSFSGYYWS |
| | I2C0-scFc scFv | | | WIRQPPGKCLEWIGDIDYSGSTKYNPSLKSRVTISLD |
| | | | | TSKNQFSLKLNSVTAADTAVYFCARKKYSTVWSYF |
| | | | | DYWGQGTLVTVSSGGGGSGGGGSGGGGSSYELTQP |
| | | | | ASASVSPGQTASITCSGDKLGDKYANWYQQKPGQS |
| | | | | PILVIYHDNKRPSGIPERFSGSNSGNTATLTISGTQAM |
| | | | | DEADYYCQAYGISSAVFGCGTKLTVL |
| 482. | MU 1-B6 CC x | artificial | aa | QVQLQQWGAGLLKPSETLSLTCAVYGGSFSGYYWS |
| | I2C0-scFc | | | WIRQPPGKCLEWIGDIDYSGSTKYNPSLKSRVTISLD |
| | Bispecific molecule | | | TSKNQFSLKLNSVTAADTAVYFCARKKYSTVWSYF |
| | | | | DYWGQGTLVTVSSGGGGSGGGGSGGGGSSYELTQP |
| | | | | ASASVSPGQTASITCSGDKLGDKYANWYQQKPGQS |
| | | | | PILVIYHDNKRPSGIPERFSGSNSGNTATLTISGTQAM |
| | | | | DEADYYCQAYGISSAVFGCGTKLTVLSGGGGSEVQ |
| | | | | LVESGGGLVQPGGSLKLSCAASGFTFNKYAMNWVR |
| | | | | QAPGKGLEWVARIRSKYNNYATYYADSVKDRFTIS |
| | | | | RDDSKNTAYLQMNNLKTEDTAVYYCVRHGNFGNS |
| | | | | YISYWAYWGQGTLVTVSSGGGGSGGGGSGGGGSQ |
| | | | | TVVTQEPSLTVSPGGTVTLTCGSSTGAVTSGNYPNW |
| | | | | VQQKPGQAPRGLIGGTKFLAPGTPARFSGSLLGGKA |
| | | | | ALTLSGVQPEDEAEYYCVLWYSNRWVFGGGTKLTV |
| | | | | L |
| 483. | MU 1-B6 CC x | artificial | aa | QVQLQQWGAGLLKPSETLSLTCAVYGGSFSGYYWS |
| | I2C0-scFc | | | WIRQPPGKCLEWIGDIDYSGSTKYNPSLKSRVTISLD |
| | Bispecific HLE | | | TSKNQFSLKLNSVTAADTAVYFCARKKYSTVWSYF |
| | molecule | | | DYWGQGTLVTVSSGGGGSGGGGSGGGGSSYELTQP |
| | | | | ASASVSPGQTASITCSGDKLGDKYANWYQQKPGQS |
| | | | | PILVIYHDNKRPSGIPERFSGSNSGNTATLTISGTQAM |
| | | | | DEADYYCQAYGISSAVFGCGTKLTVLSGGGGSEVQ |
| | | | | LVESGGGLVQPGGSLKLSCAASGFTFNKYAMNWVR |
| | | | | QAPGKGLEWVARIRSKYNNYATYYADSVKDRFTIS |
| | | | | RDDSKNTAYLQMNNLKTEDTAVYYCVRHGNFGNS |
| | | | | YISYWAYWGQGTLVTVSSGGGGSGGGGSGGGGSQ |
| | | | | TVVTQEPSLTVSPGGTVTLTCGSSTGAVTSGNYPNW |
| | | | | VQQKPGQAPRGLIGGTKFLAPGTPARFSGSLLGGKA |
| | | | | ALTLSGVQPEDEAEYYCVLWYSNRWVFGGGTKLTV |
| | | | | LGGGGDKTHTCPPCPAPELLGGPSVFLFPPKPKDTL |
| | | | | MISRTPEVTCVVVDVSHEDPEVKFNWYVDGVEVHN |
| | | | | AKTKPCEEQYGSTYRCVSVLTVLHQDWLNGKEYKC |
| | | | | KVSNKALPAPIEKTISKAKGQPREPQVYTLPPSREEM |
| | | | | TKNQVSLTCLVKGFYPSDIAVEWESNGQPENNYKTT |
| | | | | PPVLDSDGSFFLYSKLTVDKSRWQQGNVFSCSVMH |
| | | | | EALHNHYTQKSLSLSPGKGGGGSGGGGSGGGGSGG |
| | | | | GGSGGGGSGGGGSDKTHTCPPCPAPELLGGPSVFLF |
| | | | | PPKPKDTLMISRTPEVTCVVVDVSHEDPEVKFNWYV |
| | | | | DGVEVHNAKTKPCEEQYGSTYRCVSVLTVLHQDWL |
| | | | | NGKEYKCKVSNKALPAPIEKTISKAKGQPREPQVYT |
| | | | | LPPSREEMTKNQVSLTCLVKGFYPSDIAVEWESNGQ |
| | | | | PENNYKTTPPVLDSDGSFFLYSKLTVDKSRWQQGN |
| | | | | VFSCSVMHEALHNHYTQKSLSLSPGK |
| 484. | MU 1-A6 CC x | artificial | aa | GYYWS |
| | I2C0-scFc VH | | | |
| | CDR1 | | | |
| 485. | MU 1-A6 CC x | artificial | aa | DIDQSGSTKYNPSLKS |
| | I2C0-scFc VH | | | |
| | CDR2 | | | |
| 486. | MU 1-A6 CC x | artificial | aa | KKYSTVWSYFDY |
| | I2C0-scFc VH | | | |
| | CDR3 | | | |
| 487. | MU 1-A6 CC x | artificial | aa | SGDKLGDKYAS |
| | I2C0-scFc VL | | | |
| | CDR1 | | | |
| 488. | MU 1-A6 CC x | artificial | aa | QDRKRPS |
| | I2C0-scFc VL | | | |
| | CDR2 | | | |
| 489. | MU 1-A6 CC x | artificial | aa | QAWGSSAAV |
| | I2C0-scFc VL | | | |
| | CDR3 | | | |
| 490. | MU 1-A6 CC x | artificial | aa | QVQLQQWGAGLLKPSETLSLTCAVYGGSFSGYYWS |
| | I2C0-scFc VH | | | WIRQPPGKCLEWIGDIDQSGSTKYNPSLKSRVTISLD |
| | | | | TSKNQFSLKLNSVTAADTAVYFCARKKYSTVWSYF |
| | | | | DYWGQGTLVTVSS |
| 491. | MU 1-A6 CC x | artificial | aa | SYELTQPSSVSVPPGQTASITCSGDKLGDKYASWYQ |
| | I2C0-scFc VL | | | QKPGQSPVLVIYQDRKRPSGVPERFSGSNSGNTATLT |
| | | | | ISGTQAMDEADYYCQAWGSSAAVFGCGTKLTVL |
| 492. | MU 1-A6 CC x | artificial | aa | QVQLQQWGAGLLKPSETLSLTCAVYGGSFSGYYWS |
| | I2C0-scFc scFv | | | WIRQPPGKCLEWIGDIDQSGSTKYNPSLKSRVTISLD |
| | | | | TSKNQFSLKLNSVTAADTAVYFCARKKYSTVWSYF |
| | | | | DYWGQGTLVTVSSGGGGSGGGGSGGGGSSYELTQP |
| | | | | SSVSVPPGQTASITCSGDKLGDKYASWYQQKPGQSP |
| | | | | VLVIYQDRKRPSGVPERFSGSNSGNTATLTISGTQAM |
| | | | | DEADYYCQAWGSSAAVFGCGTKLTVL |
| 493. | MU 1-A6 CC x | artificial | aa | QVQLQQWGAGLLKPSETLSLTCAVYGGSFSGYYWS |
| | I2C0-scFc | | | WIRQPPGKCLEWIGDIDQSGSTKYNPSLKSRVTISLD |
| | Bispecific molecule | | | TSKNQFSLKLNSVTAADTAVYFCARKKYSTVWSYF |
| | | | | DYWGQGTLVTVSSGGGGSGGGGSGGGGSSYELTQP |
| | | | | SSVSVPPGQTASITCSGDKLGDKYASWYQQKPGQSP |
| | | | | VLVIYQDRKRPSGVPERFSGSNSGNTATLTISGTQAM |
| | | | | DEADYYCQAWGSSAAVFGCGTKLTVLSGGGGSEV |
| | | | | QLVESGGGLVQPGGSLKLSCAASGFTFNKYAMNWV |
| | | | | RQAPGKGLEWVARIRSKYNNYATYYADSVKDRFTI |
| | | | | SRDDSKNTAYLQMNNLKTEDTAVYYCVRHGNFGN |
| | | | | SYISYWAYWGQGTLVTVSSGGGGSGGGGSGGGGSQ |
| | | | | TVVTQEPSLTVSPGGTVTLTCGSSTGAVTSGNYPNW |
| | | | | VQQKPGQAPRGLIGGTKFLAPGTPARFSGSLLGGKA |
| | | | | ALTLSGVQPEDEAEYYCVLWYSNRWVFGGGTKLTV |
| | | | | L |
| 494. | MU 1-A6 CC x | artificial | aa | QVQLQQWGAGLLKPSETLSLTCAVYGGSFSGYYWS |
| | I2C0-scFc | | | WIRQPPGKCLEWIGDIDQSGSTKYNPSLKSRVTISLD |
| | Bispecific HLE | | | TSKNQFSLKLNSVTAADTAVYFCARKKYSTVWSYF |
| | molecule | | | DYWGQGTLVTVSSGGGGSGGGGSGGGGSSYELTQP |
| | | | | SSVSVPPGQTASITCSGDKLGDKYASWYQQKPGQSP |
| | | | | VLVIYQDRKRPSGVPERFSGSNSGNTATLTISGTQAM |
| | | | | DEADYYCQAWGSSAAVFGCGTKLTVLSGGGGSEV |
| | | | | QLVESGGGLVQPGGSLKLSCAASGFTFNKYAMNWV |
| | | | | RQAPGKGLEWVARIRSKYNNYATYYADSVKDRFTI |
| | | | | SRDDSKNTAYLQMNNLKTEDTAVYYCVRHGNFGN |
| | | | | SYISYWAYWGQGTLVTVSSGGGGSGGGGSGGGGSQ |
| | | | | TVVTQEPSLTVSPGGTVTLTCGSSTGAVTSGNYPNW |
| | | | | VQQKPGQAPRGLIGGTKFLAPGTPARFSGSLLGGKA |
| | | | | ALTLSGVQPEDEAEYYCVLWYSNRWVFGGGTKLTV |
| | | | | LGGGGDKTHTCPPCPAPELLGGPSVFLFPPKPKDTL |
| | | | | MISRTPEVTCVVVDVSHEDPEVKFNWYVDGVEVHN |
| | | | | AKTKPCEEQYGSTYRCVSVLTVLHQDWLNGKEYKC |
| | | | | KVSNKALPAPIEKTISKAKGQPREPQVYTLPPSREEM |
| | | | | TKNQVSLTCLVKGFYPSDIAVEWESNGQPENNYKTT |
| | | | | PPVLDSDGSFFLYSKLTVDKSRWQQGNVFSCSVMH |
| | | | | EALHNHYTQKSLSLSPGKGGGGSGGGGSGGGGSGG |
| | | | | GGSGGGGSGGGGSDKTHTCPPCPAPELLGGPSVFLF |
| | | | | PPKPKDTLMISRTPEVTCVVVDVSHEDPEVKFNWYV |
| | | | | DGVEVHNAKTKPCEEQYGSTYRCVSVLTVLHQDWL |
| | | | | NGKEYKCKVSNKALPAPIEKTISKAKGQPREPQVYT |
| | | | | LPPSREEMTKNQVSLTCLVKGFYPSDIAVEWESNGQ |
| | | | | PENNYKTTPPVLDSDGSFFLYSKLTVDKSRWQQGN |
| | | | | VFSCSVMHEALHNHYTQKSLSLSPGK |
| 495. | MU 0-F9 CC x | artificial | aa | SFGMH |
| | I2C0-scFc VH | | | |
| | CDR1 | | | |
| 496. | MU 0-F9 CC x | artificial | aa | VIWYTGSNKYYASSVKG |
| | I2C0-scFc VH | | | |
| | CDR2 | | | |
| 497. | MU 0-F9 CC x | artificial | aa | GGYTYGFDY |
| | I2C0-scFc VH | | | |
| | CDR3 | | | |
| 498. | MU 0-F9 CC x | artificial | aa | RASQSINRYLA |
| | I2C0-scFc VL | | | |
| | CDR1 | | | |
| 499. | MU 0-F9 CC x | artificial | aa | TASNRAT |
| | I2C0-scFc VL | | | |
| | CDR2 | | | |
| 500. | MU 0-F9 CC x | artificial | aa | HHYGSSIFT |
| | I2C0-scFc VL | | | |
| | CDR3 | | | |
| 501. | MU 0-F9 CC x | artificial | aa | QVQLVESGGGLVKPGGSLRLSCAASGFTFSSFGMH |
| | I2C0-scFc VH | | | WVRQAPGKCLEWVAVIWYTGSNKYYASSVKGRFTI |
| | | | | SRDNSKNTLYLQMNNLRAEDTAVYYCARGGYTYG |
| | | | | FDYWGQGTLVTVSS |
| 502. | MU 0-F9 CC x | artificial | aa | EIVLTQSPGTLSLSPGERATLSCRASQSINRYLAWYQ |
| | I2C0-scFc VL | | | QKPGQAPRLLIYTASNRATGIPDRFSGSGSGTDFTLTI |
| | | | | SRLEPEDFAVYYCHHYGSSIFTFGCGTKVEIK |
| 503. | MU 0-F9 CC x | artificial | aa | QVQLVESGGGLVKPGGSLRLSCAASGFTFSSFGMH |
| | I2C0-scFc scFv | | | WVRQAPGKCLEWVAVIWYTGSNKYYASSVKGRFTI |
| | | | | SRDNSKNTLYLQMNNLRAEDTAVYYCARGGYTYG |
| | | | | FDYWGQGTLVTVSSGGGGSGGGGSGGGGSEIVLTQ |
| | | | | SPGTLSLSPGERATLSCRASQSINRYLAWYQQKPGQ |
| | | | | APRLLIYTASNRATGIPDRFSGSGSGTDFTLTISRLEP |
| | | | | EDFAVYYCHHYGSSIFTFGCGTKVEIK |
| 504. | MU 0-F9 CC x | artificial | aa | QVQLVESGGGLVKPGGSLRLSCAASGFTFSSFGMH |
| | I2C0-scFc | | | WVRQAPGKCLEWVAVIWYTGSNKYYASSVKGRFTI |
| | Bispecific molecule | | | SRDNSKNTLYLQMNNLRAEDTAVYYCARGGYTYG |
| | | | | FDYWGQGTLVTVSSGGGGSGGGGSGGGGSEIVLTQ |
| | | | | SPGTLSLSPGERATLSCRASQSINRYLAWYQQKPGQ |
| | | | | APRLLIYTASNRATGIPDRFSGSGSGTDFTLTISRLEP |
| | | | | EDFAVYYCHHYGSSIFTFGCGTKVEIKSGGGGSEVQ |
| | | | | LVESGGGLVQPGGSLKLSCAASGFTFNKYAMNWVR |
| | | | | QAPGKGLEWVARIRSKYNNYATYYADSVKDRFTIS |
| | | | | RDDSKNTAYLQMNNLKTEDTAVYYCVRHGNFGNS |
| | | | | YISYWAYWGQGTLVTVSSGGGGSGGGGSGGGGSQ |
| | | | | TVVTQEPSLTVSPGGTVTLTCGSSTGAVTSGNYPNW |
| | | | | VQQKPGQAPRGLIGGTKFLAPGTPARFSGSLLGGKA |
| | | | | ALTLSGVQPEDEAEYYCVLWYSNRWVFGGGTKLTV |
| | | | | L |
| 505. | MU 0-F9 CC x | artificial | aa | QVQLVESGGGLVKPGGSLRLSCAASGFTFSSFGMH |
| | I2C0-scFc | | | WVRQAPGKCLEWVAVIWYTGSNKYYASSVKGRFTI |
| | Bispecific HLE | | | SRDNSKNTLYLQMNNLRAEDTAVYYCARGGYTYG |
| | molecule | | | FDYWGQGTLVTVSSGGGGSGGGGSGGGGSEIVLTQ |
| | | | | SPGTLSLSPGERATLSCRASQSINRYLAWYQQKPGQ |
| | | | | APRLLIYTASNRATGIPDRFSGSGSGTDFTLTISRLEP |
| | | | | EDFAVYYCHHYGSSIFTFGCGTKVEIKSGGGGSEVQ |
| | | | | LVESGGGLVQPGGSLKLSCAASGFTFNKYAMNWVR |
| | | | | QAPGKGLEWVARIRSKYNNYATYYADSVKDRFTIS |
| | | | | RDDSKNTAYLQMNNLKTEDTAVYYCVRHGNFGNS |
| | | | | YISYWAYWGQGTLVTVSSGGGGSGGGGSGGGGSQ |
| | | | | TVVTQEPSLTVSPGGTVTLTCGSSTGAVTSGNYPNW |
| | | | | VQQKPGQAPRGLIGGTKFLAPGTPARFSGSLLGGKA |
| | | | | ALTLSGVQPEDEAEYYCVLWYSNRWVFGGGTKLTV |
| | | | | LGGGGDKTHTCPPCPAPELLGGPSVFLFPPKPKDTL |
| | | | | MISRTPEVTCVVVDVSHEDPEVKFNWYVDGVEVHN |
| | | | | AKTKPCEEQYGSTYRCVSVLTVLHQDWLNGKEYKC |
| | | | | KVSNKALPAPIEKTISKAKGQPREPQVYTLPPSREEM |
| | | | | TKNQVSLTCLVKGFYPSDIAVEWESNGQPENNYKTT |
| | | | | PPVLDSDGSFFLYSKLTVDKSRWQQGNVFSCSVMH |
| | | | | EALHNHYTQKSLSLSPGKGGGGSGGGGSGGGGSGG |
| | | | | GGSGGGGSGGGGSDKTHTCPPCPAPELLGGPSVFLF |
| | | | | PPKPKDTLMISRTPEVTCVVVDVSHEDPEVKFNWYV |
| | | | | DGVEVHNAKTKPCEEQYGSTYRCVSVLTVLHQDWL |
| | | | | NGKEYKCKVSNKALPAPIEKTISKAKGQPREPQVYT |
| | | | | LPPSREEMTKNQVSLTCLVKGFYPSDIAVEWESNGQ |
| | | | | PENNYKTTPPVLDSDGSFFLYSKLTVDKSRWQQGN |
| | | | | VFSCSVMHEALHNHYTQKSLSLSPGK |
| 506. | MU 0-F6 CC x | artificial | aa | SYGMH |
| | I2C0-scFc VH | | | |
| | CDR1 | | | |
| 507. | MU 0-F6 CC x | artificial | aa | VIWFDASNKYYAESVKG |
| | I2C0-scFc VH | | | |
| | CDR2 | | | |
| 508. | MU 0-F6 CC x | artificial | aa | GGYTYGFDY |
| | I2C0-scFc VH | | | |
| | CDR3 | | | |
| 509. | MU 0-F6 CC x | artificial | aa | RASQSINRYLA |
| | I2C0-scFc VL | | | |
| | CDR1 | | | |
| 510. | MU 0-F6 CC x | artificial | aa | TASNRAT |
| | I2C0-scFc VL | | | |
| | CDR2 | | | |
| 511. | MU 0-F6 CC x | artificial | aa | HHYGSSIFT |
| | I2C0-scFc VL | | | |
| | CDR3 | | | |
| 512. | MU 0-F6 CC x | artificial | aa | QVQLVESGGGLVKPGRSLRLSCAASGFTFSSYGMH |
| | I2C0-scFc VH | | | WVRQAPGKCLEWVAVIWFDASNKYYAESVKGRFTI |
| | | | | SRDNSKNTLYLQMNNLRAEDTAVYYCARGGYTYG |
| | | | | FDYWGQGTLVTVSS |
| 513. | MU 0-F6 CC x | artificial | aa | EIVLTQSPGTLSLSPGERATLSCRASQSINRYLAWYQ |
| | I2C0-scFc VL | | | QKPGQAPRLLIYTASNRATGIPDRFSGSGSGTDFTLTI |
| | | | | SRLEPEDFAVYYCHHYGSSIFTFGCGTKVEIK |
| 514. | MU 0-F6 CC x | artificial | aa | QVQLVESGGGLVKPGRSLRLSCAASGFTFSSYGMH |
| | I2C0-scFc scFv | | | WVRQAPGKCLEWVAVIWFDASNKYYAESVKGRFTI |
| | | | | SRDNSKNTLYLQMNNLRAEDTAVYYCARGGYTYG |
| | | | | FDYWGQGTLVTVSSGGGGSGGGGSGGGGSEIVLTQ |
| | | | | SPGTLSLSPGERATLSCRASQSINRYLAWYQQKPGQ |
| | | | | APRLLIYTASNRATGIPDRFSGSGSGTDFTLTISRLEP |
| | | | | EDFAVYYCHHYGSSIFTFGCGTKVEIK |
| 515. | MU 0-F6 CC x | artificial | aa | QVQLVESGGGLVKPGRSLRLSCAASGFTFSSYGMH |
| | I2C0-scFc | | | WVRQAPGKCLEWVAVIWFDASNKYYAESVKGRFTI |
| | Bispecific molecule | | | SRDNSKNTLYLQMNNLRAEDTAVYYCARGGYTYG |
| | | | | FDYWGQGTLVTVSSGGGGSGGGGSGGGGSEIVLTQ |
| | | | | SPGTLSLSPGERATLSCRASQSINRYLAWYQQKPGQ |
| | | | | APRLLIYTASNRATGIPDRFSGSGSGTDFTLTISRLEP |
| | | | | EDFAVYYCHHYGSSIFTFGCGTKVEIKSGGGGSEVQ |
| | | | | LVESGGGLVQPGGSLKLSCAASGFTFNKYAMNWVR |
| | | | | QAPGKGLEWVARIRSKYNNYATYYADSVKDRFTIS |
| | | | | RDDSKNTAYLQMNNLKTEDTAVYYCVRHGNFGNS |
| | | | | YISYWAYWGQGTLVTVSSGGGGSGGGGSGGGGSQ |
| | | | | TVVTQEPSLTVSPGGTVTLTCGSSTGAVTSGNYPNW |
| | | | | VQQKPGQAPRGLIGGTKFLAPGTPARFSGSLLGGKA |
| | | | | ALTLSGVQPEDEAEYYCVLWYSNRWVFGGGTKLTV |
| | | | | L |
| 516. | MU 0-F6 CC x | artificial | aa | QVQLVESGGGLVKPGRSLRLSCAASGFTFSSYGMH |
| | I2C0-scFc | | | WVRQAPGKCLEWVAVIWFDASNKYYAESVKGRFTI |
| | Bispecific HLE | | | SRDNSKNTLYLQMNNLRAEDTAVYYCARGGYTYG |
| | molecule | | | FDYWGQGTLVTVSSGGGGSGGGGSGGGGSEIVLTQ |
| | | | | SPGTLSLSPGERATLSCRASQSINRYLAWYQQKPGQ |
| | | | | APRLLIYTASNRATGIPDRFSGSGSGTDFTLTISRLEP |
| | | | | EDFAVYYCHHYGSSIFTFGCGTKVEIKSGGGGSEVQ |
| | | | | LVESGGGLVQPGGSLKLSCAASGFTFNKYAMNWVR |
| | | | | QAPGKGLEWVARIRSKYNNYATYYADSVKDRFTIS |
| | | | | RDDSKNTAYLQMNNLKTEDTAVYYCVRHGNFGNS |
| | | | | YISYWAYWGQGTLVTVSSGGGGSGGGGSGGGGSQ |
| | | | | TVVTQEPSLTVSPGGTVTLTCGSSTGAVTSGNYPNW |
| | | | | VQQKPGQAPRGLIGGTKFLAPGTPARFSGSLLGGKA |
| | | | | ALTLSGVQPEDEAEYYCVLWYSNRWVFGGGTKLTV |
| | | | | LGGGGDKTHTCPPCPAPELLGGPSVFLFPPKPKDTL |
| | | | | MISRTPEVTCVVVDVSHEDPEVKFNWYVDGVEVHN |
| | | | | AKTKPCEEQYGSTYRCVSVLTVLHQDWLNGKEYKC |
| | | | | KVSNKALPAPIEKTISKAKGQPREPQVYTLPPSREEM |
| | | | | TKNQVSLTCLVKGFYPSDIAVEWESNGQPENNYKTT |
| | | | | PPVLDSDGSFFLYSKLTVDKSRWQQGNVFSCSVMH |
| | | | | EALHNHYTQKSLSLSPGKGGGGSGGGGSGGGGSGG |
| | | | | GGSGGGGSGGGGSDKTHTCPPCPAPELLGGPSVFLF |
| | | | | PPKPKDTLMISRTPEVTCVVVDVSHEDPEVKFNWYV |
| | | | | DGVEVHNAKTKPCEEQYGSTYRCVSVLTVLHQDWL |
| | | | | NGKEYKCKVSNKALPAPIEKTISKAKGQPREPQVYT |
| | | | | LPPSREEMTKNQVSLTCLVKGFYPSDIAVEWESNGQ |
| | | | | PENNYKTTPPVLDSDGSFFLYSKLTVDKSRWQQGN |
| | | | | VFSCSVMHEALHNHYTQKSLSLSPGK |
| 517. | MU 0-E5 CC x | artificial | aa | SYGMH |
| | I2C0-scFc VH | | | |
| | CDR1 | | | |
| 518. | MU 0-E5 CC x | artificial | aa | VIWYDASNKYYATSVKG |
| | I2C0-scFc VH | | | |
| | CDR2 | | | |
| 519. | MU 0-E5 CC x | artificial | aa | GGYTYGFDY |
| | I2C0-scFc VH | | | |
| | CDR3 | | | |
| 520. | MU 0-E5 CC x | artificial | aa | RASQSINRYLA |
| | I2C0-scFc VL | | | |
| | CDR1 | | | |
| 521. | MU 0-E5 CC x | artificial | aa | TASNRAT |
| | I2C0-scFc VL | | | |
| | CDR2 | | | |
| 522. | MU 0-E5 CC x | artificial | aa | HHYGSSIFT |
| | I2C0-scFc VL | | | |
| | CDR3 | | | |
| 523. | MU 0-E5 CC x | artificial | aa | QVQLVESGGGVVKPGRSLRLSCAASGFTFSSYGMH |
| | I2C0-scFc VH | | | WVRQAPGKCLEWVAVIWYDASNKYYATSVKGRFT |
| | | | | ISRDNSKNTLYLQMNNLRAEDTAVYYCARGGYTYG |
| | | | | FDYWGQGTLVTVSS |
| 524. | MU 0-E5 CC x | artificial | aa | EIVLTQSPGTLSLSPGERATLSCRASQSINRYLAWYQ |
| | I2C0-scFc VL | | | QKPGQAPRLLIYTASNRATGIPDRFSGSGSGTDFTLTI |
| | | | | SRLEPEDFAVYYCHHYGSSIFTFGCGTKVEIK |
| 525. | MU 0-E5 CC x | artificial | aa | QVQLVESGGGVVKPGRSLRLSCAASGFTFSSYGMH |
| | I2C0-scFc scFv | | | WVRQAPGKCLEWVAVIWYDASNKYYATSVKGRFT |
| | | | | ISRDNSKNTLYLQMNNLRAEDTAVYYCARGGYTYG |
| | | | | FDYWGQGTLVTVSSGGGGSGGGGSGGGGSEIVLTQ |
| | | | | SPGTLSLSPGERATLSCRASQSINRYLAWYQQKPGQ |
| | | | | APRLLIYTASNRATGIPDRFSGSGSGTDFTLTISRLEP |
| | | | | EDFAVYYCHHYGSSIFTFGCGTKVEIK |
| 526. | MU 0-E5 CC x | artificial | aa | QVQLVESGGGVVKPGRSLRLSCAASGFTFSSYGMH |
| | I2C0-scFc | | | WVRQAPGKCLEWVAVIWYDASNKYYATSVKGRFT |
| | Bispecific molecule | | | ISRDNSKNTLYLQMNNLRAEDTAVYYCARGGYTYG |
| | | | | FDYWGQGTLVTVSSGGGGSGGGGSGGGGSEIVLTQ |
| | | | | SPGTLSLSPGERATLSCRASQSINRYLAWYQQKPGQ |
| | | | | APRLLIYTASNRATGIPDRFSGSGSGTDFTLTISRLEP |
| | | | | EDFAVYYCHHYGSSIFTFGCGTKVEIKSGGGGSEVQ |
| | | | | LVESGGGLVQPGGSLKLSCAASGFTFNKYAMNWVR |
| | | | | QAPGKGLEWVARIRSKYNNYATYYADSVKDRFTIS |
| | | | | RDDSKNTAYLQMNNLKTEDTAVYYCVRHGNFGNS |
| | | | | YISYWAYWGQGTLVTVSSGGGGSGGGGSGGGGSQ |
| | | | | TVVTQEPSLTVSPGGTVTLTCGSSTGAVTSGNYPNW |
| | | | | VQQKPGQAPRGLIGGTKFLAPGTPARFSGSLLGGKA |
| | | | | ALTLSGVQPEDEAEYYCVLWYSNRWVFGGGTKLTV |
| | | | | L |
| 527. | MU 0-E5 CC x | artificial | aa | QVQLVESGGGVVKPGRSLRLSCAASGFTFSSYGMH |
| | I2C0-scFc | | | WVRQAPGKCLEWVAVIWYDASNKYYATSVKGRFT |
| | Bispecific HLE | | | ISRDNSKNTLYLQMNNLRAEDTAVYYCARGGYTYG |
| | molecule | | | FDYWGQGTLVTVSSGGGGSGGGGSGGGGSEIVLTQ |
| | | | | SPGTLSLSPGERATLSCRASQSINRYLAWYQQKPGQ |
| | | | | APRLLIYTASNRATGIPDRFSGSGSGTDFTLTISRLEP |
| | | | | EDFAVYYCHHYGSSIFTFGCGTKVEIKSGGGGSEVQ |
| | | | | LVESGGGLVQPGGSLKLSCAASGFTFNKYAMNWVR |
| | | | | QAPGKGLEWVARIRSKYNNYATYYADSVKDRFTIS |
| | | | | RDDSKNTAYLQMNNLKTEDTAVYYCVRHGNFGNS |
| | | | | YISYWAYWGQGTLVTVSSGGGGSGGGGSGGGGSQ |
| | | | | TVVTQEPSLTVSPGGTVTLTCGSSTGAVTSGNYPNW |
| | | | | VQQKPGQAPRGLIGGTKFLAPGTPARFSGSLLGGKA |
| | | | | ALTLSGVQPEDEAEYYCVLWYSNRWVFGGGTKLTV |
| | | | | LGGGGDKTHTCPPCPAPELLGGPSVFLFPPKPKDTL |
| | | | | MISRTPEVTCVVVDVSHEDPEVKFNWYVDGVEVHN |
| | | | | AKTKPCEEQYGSTYRCVSVLTVLHQDWLNGKEYKC |
| | | | | KVSNKALPAPIEKTISKAKGQPREPQVYTLPPSREEM |
| | | | | TKNQVSLTCLVKGFYPSDIAVEWESNGQPENNYKTT |
| | | | | PPVLDSDGSFFLYSKLTVDKSRWQQGNVFSCSVMH |
| | | | | EALHNHYTQKSLSLSPGKGGGGSGGGGSGGGGSGG |
| | | | | GGSGGGGSGGGGSDKTHTCPPCPAPELLGGPSVFLF |
| | | | | PPKPKDTLMISRTPEVTCVVVDVSHEDPEVKFNWYV |
| | | | | DGVEVHNAKTKPCEEQYGSTYRCVSVLTVLHQDWL |
| | | | | NGKEYKCKVSNKALPAPIEKTISKAKGQPREPQVYT |
| | | | | LPPSREEMTKNQVSLTCLVKGFYPSDIAVEWESNGQ |
| | | | | PENNYKTTPPVLDSDGSFFLYSKLTVDKSRWQQGN |
| | | | | VFSCSVMHEALHNHYTQKSLSLSPGK |
| 528. | MUC17 epitope E2 | artificial | aa | EVVSSIDIGPPETISAQMELTVTVTSVKFTEELKNHSS |
| | | | | QEFQEFKQTFTEQMNIVYSGIPEYVGVNITKLRLGSV |
| | | | | VVEHDVLLRTKYTPEYKTVLDNATEVVKEKITKVTT |
| | | | | QQIMINDICSDMMCF |
| 529. | MUC17 epitope E2 | artificial | aa | SAQMELTVTVTSVKFTEELKNHSSQEFQEFKQTFTE |
| | (N-term shortened) | | | QMNIVYSGIPEYVGVNITKLRLGSVVVEHDVLLRTK |
| | | | | YTPEYKTVLDNATEVVKEKITKVTTQQIMINDICS |
| 530. | MUC17 epitope 5A | artificial | aa | RTTTCFGDGCQNTASRCKNGGTWDGLKCQCPNLYY |
| | (comprises part of | | | GELCEEVVSSIDIGPPETISAQMELTVTVTSVKFTEEL |
| | E2) | | | KNHSSQEFQEFKQTFTEQMNIVYSGIPEYVGVNITKL |
| | | | | RLG |
| 531. | MUC17 epitope 5B | artificial | aa | SVVVEHDVLLRTKYTPEYKTVLDNATEVVKEKITK |
| | (comprises part of | | | VTTQQIMINDICSDMMCFNTTGTQVQNITVTQYDPE |
| | E2) | | | EDCRKMAKEYGDYFVVEYRDQKPYCISPCEPGFSVS |
| | | | | KNCNLGKCQMSLSGPQCLCVTTETHWYSGETCNQG |
| | | | | TQKS |
| 532. | MUC17 epitope E2 | artificial | aa | EVVSSIDIGPPETISAQMELTVTVTSVKFTEELKNHSS |
| | trunk2 | | | QEFQEFKQTFTEQMNIVYSGIPEYVGVNITKLRLGSV |
| | | | | VVEHDVLLRTKYTPEYKTVLDNATEVVKEKITKVTT |
| | | | | QQIMINDICSDMMCFNTTGTQVQNITVTQYDPEEDC |
| | | | | RKMAKEYGDYFVVEYRDQKPYCISPCEPGFSVSKNC |
| | | | | NLGKCQMSLSGPQCLCVTTETHWYSGETCNQGTQK |
| | | | | SL |
| 533. | MUC17 epitope E2 | artificial | aa | ISAQMELTVTVTSVKFTEELKNHSSQEFQEFKQTFTE |
| | trunk3 | | | QMNIVYSGIPEYVGVNITKLRLGSVVVEHDVLLRTK |
| | | | | YTPEYKTVLDNATEVVKEKITKVTTQQIMINDICSD |
| | | | | MMCFNTTGTQVQNITVTQYDPEEDCRKMAKEYGD |
| | | | | YFVVEYRDQKPYCISPCEPGFSVSKNCNLGKCQMSL |
| | | | | SGPQCLCVTTETHWYSGETCNQGTQKSL |
| 534. | MUC17 epitope E2 | artificial | aa | DMMCFNTTGTQVQNITVTQYDPEEDCRKMAKEYG |
| | trunk4 | | | DYFVVEYRDQKPYCISPCEPGFSVSKNCNLGKCQMS |
| | | | | LSGPQCLCVTTETHWYSGETCNQGTQKSL |
| 535. | MUC17 epitope E2 | artificial | aa | SPCEPGFSVSKNCNLGKCQMSLSGPQCLCVTTETHW |
| | trunk5 | | | YSGETCNQGTQKSL |

1. A bispecific antibody construct comprising:
a first domain which binds to MUC17, and
a second domain which binds to an extracellular epitope of the human and the Macaca CD3ε chain.

2. The bispecific antibody construct of claim 1 further comprising a third domain which comprises two polypeptide monomers, each comprising a hinge, a CH2 domain and a CH3 domain, wherein said two polypeptide monomers are fused to each other via a peptide linker.

3. The bispecific antibody construct of claim 1 or 2, wherein the antibody construct is a single chain antibody construct.

4. The bispecific antibody construct of claim 2 or 3, wherein said third domain comprises in an amino to carboxyl order:
hinge-CH2-CH3-linker-hinge-CH2-CH3.

5. The bispecific antibody construct of claim 1, wherein each of said polypeptide monomers in the third domain comprises an amino acid sequence that is at least 90% identical to a sequence selected from the group consisting of: SEQ ID NO: 17-24.

6-7. (canceled)

8. The bispecific antibody construct of claim 1, wherein
(i) the first domain comprises two antibody variable domains and the second domain comprises two antibody variable domains;
(ii) the first domain comprises one antibody variable domain and the second domain comprises two antibody variable domains;
(iii) the first domain comprises two antibody variable domains and the second domain comprises one antibody variable domain; or
(iv) the first domain comprises one antibody variable domain and the second domain comprises one antibody variable domain.

9. The bispecific antibody construct of claim 1, wherein the first and second domain are fused to the third domain via a peptide linker.

10. The bispecific antibody construct of claim 1, wherein the antibody construct comprises in an amino to carboxyl order:
(a) the first domain;
(b) a peptide linker preferably having an amino acid sequence selected from the group consisting of SEQ ID NOs: 1-3;
(c) the second domain.

11. The bispecific antibody construct of claim 10, wherein the antibody construct further comprises in an amino to carboxyl order:
(d) a peptide linker having an amino acid sequence selected from the group consisting of SEQ ID NOs: 1, 2, 3, 9, 10, 11 and 12.
(e) the first polypeptide monomer of the third domain;
(f) a peptide linker having an amino acid sequence selected from the group consisting of SEQ ID NOs: 5, 6, 7 and 8; and
(g) the second polypeptide monomer of the third domain.

12. The bispecific antibody construct of claim 1, wherein the first domain of the antibody construct binds to an epitope within MUC17 which corresponds to SEQ ID NO. 528 (aa 4171 to 4296 according to uniprot Q685J3 numbering).

13. The bispecific antibody construct of claim 1, wherein the first domain of the antibody construct binds to an epitope within MUC17 which corresponds to SEQ ID NO. 529 (aa 4184 to 4291 according to uniprot Q685J3 numbering).

14. The bispecific antibody construct of claim 1, wherein the first domain of the antibody construct binds to an epitope within MUC17 which corresponds to SEQ ID NO. 530 (aa 4131 to 4243 according to uniprot Q685J3 numbering).

15. The bispecific antibody construct of claim 1, wherein the first domain of the antibody construct binds to an epitope within MUC17 which corresponds to SEQ ID NO. 531 (aa 4244 to 4389 according to uniprot Q685J3 numbering).

16. The bispecific antibody construct of claim 1, wherein the first domain of the antibody construct binds to an epitope within MUC17 which corresponds to SEQ ID NO. 530 (aa 4131 to 4243 according to uniprot Q685J3 numbering) but not to an epitope within MUC17 which corresponds to SEQ ID NO. 531 (aa 4244 to 4389 according to uniprot Q685J3 numbering).

17. The bispecific antibody construct of claim 1, wherein the first domain of the antibody construct binds to an epitope within MUC17 which corresponds to SEQ ID NO. 532 (aa 4171 to 4390 according to uniprot Q685J3 numbering) or SEQ ID NO. 533 (aa 4184 to 4390 according to uniprot Q685J3 numbering) but not to an epitope within MUC17 which corresponds to SEQ ID NO. 534 (aa 4291 to 4390 according to uniprot Q685J3 numbering) or to an epitope within MUC17 which corresponds to SEQ ID NO. 535 (aa 4341 to 4390 according to uniprot Q685J3 numbering).

18-20. (canceled)

21. The bispecific antibody construct of claim 1, wherein the first binding domain comprises a VH region comprising CDR-H 1, CDR-H2 and CDR-H3 selected from:
(a) CDR-H1 as depicted in SEQ ID NO. 33, CDR-H2 as depicted in SEQ ID NO. 34 and CDR-H3 as depicted in SEQ ID NO. 35;
(b) CDR-H1 as depicted in SEQ ID NO. 44, CDR-H2 as depicted in SEQ ID NO. 45 and CDR-H3 as depicted in SEQ ID NO. 46;
(c) CDR-H1 as depicted in SEQ ID NO. 55, CDR-H2 as depicted in SEQ ID NO. 56 and CDR-H3 as depicted in SEQ ID NO. 57;
(d) CDR-H1 as depicted in SEQ ID NO. 66, CDR-H2 as depicted in SEQ ID NO. 67 and CDR-H3 as depicted in SEQ ID NO. 68;
(e) CDR-H1 as depicted in SEQ ID NO. 77, CDR-H2 as depicted in SEQ ID NO. 78 and CDR-H3 as depicted in SEQ ID NO. 79;
(f) CDR-H1 as depicted in SEQ ID NO. 88, CDR-H2 as depicted in SEQ ID NO. 89 and CDR-H3 as depicted in SEQ ID NO. 90;
(g) CDR-H1 as depicted in SEQ ID NO. 99, CDR-H2 as depicted in SEQ ID NO. 100 and CDR-H3 as depicted in SEQ ID NO. 101;
(h) CDR-H1 as depicted in SEQ ID NO. 110, CDR-H2 as depicted in SEQ ID NO. 111 and CDR-H3 as depicted in SEQ ID NO. 112;
(i) CDR-H1 as depicted in SEQ ID NO. 121, CDR-H2 as depicted in SEQ ID NO. 122 and CDR-H3 as depicted in SEQ ID NO. 123;
(j) CDR-H1 as depicted in SEQ ID NO. 132, CDR-H2 as depicted in SEQ ID NO. 133 and CDR-H3 as depicted in SEQ ID NO. 134;
(k) CDR-H1 as depicted in SEQ ID NO. 143, CDR-H2 as depicted in SEQ ID NO. 144 and CDR-H3 as depicted in SEQ ID NO. 145;
(l) CDR-H1 as depicted in SEQ ID NO. 154, CDR-H2 as depicted in SEQ ID NO. 155 and CDR-H3 as depicted in SEQ ID NO. 156;
(m) CDR-H1 as depicted in SEQ ID NO. 165, CDR-H2 as depicted in SEQ ID NO. 166 and CDR-H3 as depicted in SEQ ID NO. 167;
(n) CDR-H1 as depicted in SEQ ID NO. 176, CDR-H2 as depicted in SEQ ID NO. 177 and CDR-H3 as depicted in SEQ ID NO. 178;
(o) CDR-H1 as depicted in SEQ ID NO. 187, CDR-H2 as depicted in SEQ ID NO. 188 and CDR-H3 as depicted in SEQ ID NO. 189;
(p) CDR-H1 as depicted in SEQ ID NO. 198, CDR-H2 as depicted in SEQ ID NO. 199 and CDR-H3 as depicted in SEQ ID NO. 200;
(q) CDR-H1 as depicted in SEQ ID NO. 209, CDR-H2 as depicted in SEQ ID NO. 210 and CDR-H3 as depicted in SEQ ID NO. 211;
(r) CDR-H1 as depicted in SEQ ID NO. 220, CDR-H2 as depicted in SEQ ID NO. 221 and CDR-H3 as depicted in SEQ ID NO. 222;
(s) CDR-H1 as depicted in SEQ ID NO. 231, CDR-H2 as depicted in SEQ ID NO. 232 and CDR-H3 as depicted in SEQ ID NO. 233;
(t) CDR-H1 as depicted in SEQ ID NO. 242, CDR-H2 as depicted in SEQ ID NO. 243 and CDR-H3 as depicted in SEQ ID NO. 244;
(u) CDR-H1 as depicted in SEQ ID NO. 253, CDR-H2 as depicted in SEQ ID NO. 254 and CDR-H3 as depicted in SEQ ID NO. 255;
(v) CDR-H1 as depicted in SEQ ID NO. 264, CDR-H2 as depicted in SEQ ID NO. 265 and CDR-H3 as depicted in SEQ ID NO. 266;
(w) CDR-H1 as depicted in SEQ ID NO. 275, CDR-H2 as depicted in SEQ ID NO. 276 and CDR-H3 as depicted in SEQ ID NO. 276;
(x) CDR-H1 as depicted in SEQ ID NO. 286, CDR-H2 as depicted in SEQ ID NO. 287 and CDR-H3 as depicted in SEQ ID NO. 288;
(y) CDR-H1 as depicted in SEQ ID NO. 297, CDR-H2 as depicted in SEQ ID NO. 298 and CDR-H3 as depicted in SEQ ID NO. 299;
(z) CDR-H1 as depicted in SEQ ID NO. 308, CDR-H2 as depicted in SEQ ID NO. 309 and CDR-H3 as depicted in SEQ ID NO. 310;
(aa) CDR-H1 as depicted in SEQ ID NO. 319, CDR-H2 as depicted in SEQ ID NO. 320 and CDR-H3 as depicted in SEQ ID NO. 321;
(ab) CDR-H1 as depicted in SEQ ID NO. 330, CDR-H2 as depicted in SEQ ID NO. 331 and CDR-H3 as depicted in SEQ ID NO. 332;
(ac) CDR-H1 as depicted in SEQ ID NO. 341, CDR-H2 as depicted in SEQ ID NO. 342 and CDR-H3 as depicted in SEQ ID NO. 343;
(ad) CDR-H1 as depicted in SEQ ID NO. 352, CDR-H2 as depicted in SEQ ID NO. 353 and CDR-H3 as depicted in SEQ ID NO. 354;
(ae) CDR-H1 as depicted in SEQ ID NO. 363, CDR-H2 as depicted in SEQ ID NO. 364 and CDR-H3 as depicted in SEQ ID NO. 365;
(af) CDR-H1 as depicted in SEQ ID NO. 374, CDR-H2 as depicted in SEQ ID NO. 375 and CDR-H3 as depicted in SEQ ID NO. 376;
(ag) CDR-H1 as depicted in SEQ ID NO. 385, CDR-H2 as depicted in SEQ ID NO. 386 and CDR-H3 as depicted in SEQ ID NO. 386;
(ah) CDR-H1 as depicted in SEQ ID NO. 396, CDR-H2 as depicted in SEQ ID NO. 397 and CDR-H3 as depicted in SEQ ID NO. 398;
(ai) CDR-H1 as depicted in SEQ ID NO. 407, CDR-H2 as depicted in SEQ ID NO. 408 and CDR-H3 as depicted in SEQ ID NO. 409;
(aj) CDR-H1 as depicted in SEQ ID NO. 418, CDR-H2 as depicted in SEQ ID NO. 419 and CDR-H3 as depicted in SEQ ID NO. 420;
(ak) CDR-H1 as depicted in SEQ ID NO. 429, CDR-H2 as depicted in SEQ ID NO. 430 and CDR-H3 as depicted in SEQ ID NO. 431;
(al) CDR-H1 as depicted in SEQ ID NO. 440, CDR-H2 as depicted in SEQ ID NO. 441 and CDR-H3 as depicted in SEQ ID NO. 442;
(am) CDR-H1 as depicted in SEQ ID NO. 451, CDR-H2 as depicted in SEQ ID NO. 452 and CDR-H3 as depicted in SEQ ID NO. 453;
(an) CDR-H1 as depicted in SEQ ID NO. 462, CDR-H2 as depicted in SEQ ID NO. 463 and CDR-H3 as depicted in SEQ ID NO. 464;
(ao) CDR-H1 as depicted in SEQ ID NO. 473, CDR-H2 as depicted in SEQ ID NO. 474 and CDR-H3 as depicted in SEQ ID NO. 475;
(ap) CDR-H1 as depicted in SEQ ID NO. 484, CDR-H2 as depicted in SEQ ID NO. 485 and CDR-H3 as depicted in SEQ ID NO. 486;
(aq) CDR-H1 as depicted in SEQ ID NO. 495, CDR-H2 as depicted in SEQ ID NO. 496 and CDR-H3 as depicted in SEQ ID NO. 497;
(ar) CDR-H1 as depicted in SEQ ID NO. 506, CDR-H2 as depicted in SEQ ID NO. 507 and CDR-H3 as depicted in SEQ ID NO. 508; and
(as) CDR-H1 as depicted in SEQ ID NO. 517, CDR-H2 as depicted in SEQ ID NO. 518 and CDR-H3 as depicted in SEQ ID NO. 519; wherein preferred are (c) CDR-H1 as depicted in SEQ ID NO. 55, CDR-H2 as depicted in SEQ ID NO. 56 and CDR-H3 as depicted in SEQ ID NO. 57;
(n) CDR-H1 as depicted in SEQ ID NO. 176, CDR-H2 as depicted in SEQ ID NO. 177 and CDR-H3 as depicted in SEQ ID NO. 178;
(ac) CDR-H1 as depicted in SEQ ID NO. 341, CDR-H2 as depicted in SEQ ID NO. 342 and CDR-H3 as depicted in SEQ ID NO. 343; and
(aj) CDR-H1 as depicted in SEQ ID NO. 418, CDR-H2 as depicted in SEQ ID NO. 419 and CDR-H3 as depicted in SEQ ID NO. 420.

22. The bispecific antibody construct of claim 1, wherein the first binding domain comprises a VL region comprising CDR-H1, CDR-L2 and CDR-L3 selected from:
(a) CDR-L1 as depicted in SEQ ID NO. 36, CDR-L2 as depicted in SEQ ID NO. 37 and CDR-L3 as depicted in SEQ ID NO. 38;
(b) CDR-L1 as depicted in SEQ ID NO. 47, CDR-L2 as depicted in SEQ ID NO. 48 and CDR-L3 as depicted in SEQ ID NO. 49;
(c) CDR-L1 as depicted in SEQ ID NO. 58, CDR-L2 as depicted in SEQ ID NO. 59 and CDR-L3 as depicted in SEQ ID NO. 60;
(d) CDR-L1 as depicted in SEQ ID NO. 69, CDR-L2 as depicted in SEQ ID NO. 70 and CDR-L3 as depicted in SEQ ID NO. 71;
(e) CDR-L1 as depicted in SEQ ID NO. 80, CDR-L2 as depicted in SEQ ID NO. 81 and CDR-L3 as depicted in SEQ ID NO. 82;
(f) CDR-L1 as depicted in SEQ ID NO. 91, CDR-L2 as depicted in SEQ ID NO. 92 and CDR-L3 as depicted in SEQ ID NO. 93;
(g) CDR-L1 as depicted in SEQ ID NO. 102, CDR-L2 as depicted in SEQ ID NO. 103 and CDR-L3 as depicted in SEQ ID NO. 104;
(h) CDR-L1 as depicted in SEQ ID NO. 113, CDR-L2 as depicted in SEQ ID NO. 114 and CDR-L3 as depicted in SEQ ID NO. 115;
(i) CDR-L1 as depicted in SEQ ID NO. 124, CDR-L2 as depicted in SEQ ID NO. 125 and CDR-L3 as depicted in SEQ ID NO. 126;
(j) CDR-L1 as depicted in SEQ ID NO. 135, CDR-L2 as depicted in SEQ ID NO. 136 and CDR-L3 as depicted in SEQ ID NO. 137;
(k) CDR-L1 as depicted in SEQ ID NO. 146, CDR-L2 as depicted in SEQ ID NO. 147 and CDR-L3 as depicted in SEQ ID NO. 148;
(l) CDR-L1 as depicted in SEQ ID NO. 157, CDR-L2 as depicted in SEQ ID NO. 158 and CDR-L3 as depicted in SEQ ID NO. 159;
(m) CDR-L1 as depicted in SEQ ID NO. 168, CDR-L2 as depicted in SEQ ID NO. 169 and CDR-L3 as depicted in SEQ ID NO. 170;
(n) CDR-L1 as depicted in SEQ ID NO. 179, CDR-L2 as depicted in SEQ ID NO. 180 and CDR-L3 as depicted in SEQ ID NO. 181;
(o) CDR-L1 as depicted in SEQ ID NO. 190, CDR-L2 as depicted in SEQ ID NO. 191 and CDR-L3 as depicted in SEQ ID NO. 192;
(p) CDR-L1 as depicted in SEQ ID NO. 201, CDR-L2 as depicted in SEQ ID NO. 202 and CDR-L3 as depicted in SEQ ID NO. 203;
(q) CDR-L1 as depicted in SEQ ID NO. 212, CDR-L2 as depicted in SEQ ID NO. 213 and CDR-L3 as depicted in SEQ ID NO. 214;
(r) CDR-L1 as depicted in SEQ ID NO. 223, CDR-L2 as depicted in SEQ ID NO. 224 and CDR-L3 as depicted in SEQ ID NO. 225;
(s) CDR-L1 as depicted in SEQ ID NO. 234, CDR-L2 as depicted in SEQ ID NO. 235 and CDR-L3 as depicted in SEQ ID NO. 236;
(t) CDR-L1 as depicted in SEQ ID NO. 245, CDR-L2 as depicted in SEQ ID NO. 246 and CDR-L3 as depicted in SEQ ID NO. 247;
(u) CDR-L1 as depicted in SEQ ID NO. 256, CDR-L2 as depicted in SEQ ID NO. 257 and CDR-L3 as depicted in SEQ ID NO. 258;
(v) CDR-L1 as depicted in SEQ ID NO. 267, CDR-L2 as depicted in SEQ ID NO. 268 and CDR-L3 as depicted in SEQ ID NO. 269;
(w) CDR-L1 as depicted in SEQ ID NO. 278, CDR-L2 as depicted in SEQ ID NO. 279 and CDR-L3 as depicted in SEQ ID NO. 280;
(x) CDR-L1 as depicted in SEQ ID NO. 289, CDR-L2 as depicted in SEQ ID NO. 290 and CDR-L3 as depicted in SEQ ID NO. 291;
(y) CDR-L1 as depicted in SEQ ID NO. 300, CDR-L2 as depicted in SEQ ID NO. 301 and CDR-L3 as depicted in SEQ ID NO. 302;
(z) CDR-L1 as depicted in SEQ ID NO. 311, CDR-L2 as depicted in SEQ ID NO. 312 and CDR-L3 as depicted in SEQ ID NO. 313;
(aa) CDR-L1 as depicted in SEQ ID NO. 322, CDR-L2 as depicted in SEQ ID NO. 323 and CDR-L3 as depicted in SEQ ID NO. 324;
(ab) CDR-L1 as depicted in SEQ ID NO. 333, CDR-L2 as depicted in SEQ ID NO. 334 and CDR-L3 as depicted in SEQ ID NO. 335;
(ac) CDR-L1 as depicted in SEQ ID NO. 344, CDR-L2 as depicted in SEQ ID NO. 345 and CDR-L3 as depicted in SEQ ID NO. 346;
(ad) CDR-L1 as depicted in SEQ ID NO. 355, CDR-L2 as depicted in SEQ ID NO. 356 and CDR-L3 as depicted in SEQ ID NO. 357;
(ae) CDR-L1 as depicted in SEQ ID NO. 366, CDR-L2 as depicted in SEQ ID NO. 367 and CDR-L3 as depicted in SEQ ID NO. 368;
(af) CDR-L1 as depicted in SEQ ID NO. 377, CDR-L2 as depicted in SEQ ID NO. 378 and CDR-L3 as depicted in SEQ ID NO. 379;
(ag) CDR-L1 as depicted in SEQ ID NO. 388, CDR-L2 as depicted in SEQ ID NO. 389 and CDR-L3 as depicted in SEQ ID NO. 390;
(ah) CDR-L1 as depicted in SEQ ID NO. 399, CDR-L2 as depicted in SEQ ID NO. 400 and CDR-L3 as depicted in SEQ ID NO. 401;
(ai) CDR-L1 as depicted in SEQ ID NO. 410, CDR-L2 as depicted in SEQ ID NO. 411 and CDR-L3 as depicted in SEQ ID NO. 412;
(aj) CDR-L1 as depicted in SEQ ID NO. 421, CDR-L2 as depicted in SEQ ID NO. 422 and CDR-L3 as depicted in SEQ ID NO. 423;
(ak) CDR-L1 as depicted in SEQ ID NO. 432, CDR-L2 as depicted in SEQ ID NO. 433 and CDR-L3 as depicted in SEQ ID NO. 434;
(al) CDR-L1 as depicted in SEQ ID NO. 443, CDR-L2 as depicted in SEQ ID NO. 444 and CDR-L3 as depicted in SEQ ID NO. 445;
(am) CDR-L1 as depicted in SEQ ID NO. 454, CDR-L2 as depicted in SEQ ID NO. 455 and CDR-L3 as depicted in SEQ ID NO. 456;
(an) CDR-L1 as depicted in SEQ ID NO. 465, CDR-L2 as depicted in SEQ ID NO. 466 and CDR-L3 as depicted in SEQ ID NO. 467;
(ao) CDR-L1 as depicted in SEQ ID NO. 476, CDR-L2 as depicted in SEQ ID NO. 477 and CDR-L3 as depicted in SEQ ID NO. 478;
(ap) CDR-L1 as depicted in SEQ ID NO. 487, CDR-L2 as depicted in SEQ ID NO. 488 and CDR-L3 as depicted in SEQ ID NO. 489;
(aq) CDR-L1 as depicted in SEQ ID NO. 498, CDR-L2 as depicted in SEQ ID NO. 499 and CDR-L3 as depicted in SEQ ID NO. 500;
(ar) CDR-L1 as depicted in SEQ ID NO. 509, CDR-L2 as depicted in SEQ ID NO. 510 and CDR-L3 as depicted in SEQ ID NO. 511; and
(as) CDR-L1 as depicted in SEQ ID NO. 520, CDR-L2 as depicted in SEQ ID NO. 521 and CDR-L3 as depicted in SEQ ID NO. 522; wherein preferred are (c) CDR-L1 as depicted in SEQ ID NO. 58, CDR-L2 as depicted in SEQ ID NO. 59 and CDR-L3 as depicted in SEQ ID NO. 60;
(n) CDR-L1 as depicted in SEQ ID NO. 179, CDR-L2 as depicted in SEQ ID NO. 180 and CDR-L3 as depicted in SEQ ID NO. 181;
(ac) CDR-L1 as depicted in SEQ ID NO. 344, CDR-L2 as depicted in SEQ ID NO. 345 and CDR-L3 as depicted in SEQ ID NO. 346; and
(aj) CDR-L1 as depicted in SEQ ID NO. 421, CDR-L2 as depicted in SEQ ID NO. 422 and CDR-L3 as depicted in SEQ ID NO. 423.

23. The bispecific antibody construct of claim 1, wherein the first binding domain comprises a VL region and a VH region selected from the group consisting of:
(a) a VL region as depicted in SEQ ID NO. 40 and a VH region as depicted in SEQ ID NO. 39;
(b) a VL region as depicted in SEQ ID NO. 51 and a VH region as depicted in SEQ ID NO. 50;
(c) a VL region as depicted in SEQ ID NO. 62 and a VH region as depicted in SEQ ID NO. 61;
(d) a VL region as depicted in SEQ ID NO. 73 and a VH region as depicted in SEQ ID NO. 72;
(e) a VL region as depicted in SEQ ID NO. 84 and a VH region as depicted in SEQ ID NO. 83;
(f) a VL region as depicted in SEQ ID NO. 95 and a VH region as depicted in SEQ ID NO. 94;
(g) a VL region as depicted in SEQ ID NO. 106 and a VH region as depicted in SEQ ID NO. 105;
(h) a VL region as depicted in SEQ ID NO. 117 and a VH region as depicted in SEQ ID NO. 116;
(i) a VL region as depicted in SEQ ID NO. 128 and a VH region as depicted in SEQ ID NO. 127;
(j) a VL region as depicted in SEQ ID NO. 139 and a VH region as depicted in SEQ ID NO. 138;
(k) a VL region as depicted in SEQ ID NO. 150 and a VH region as depicted in SEQ ID NO. 149;
(l) a VL region as depicted in SEQ ID NO. 161 and a VH region as depicted in SEQ ID NO. 160;
(m) a VL region as depicted in SEQ ID NO. 172 and a VH region as depicted in SEQ ID NO. 171,
(n) a VL region as depicted in SEQ ID NO. 183 and a VH region as depicted in SEQ ID NO. 182;
(o) a VL region as depicted in SEQ ID NO. 194 and a VH region as depicted in SEQ ID NO. 193;
(p) a VL region as depicted in SEQ ID NO. 205 and a VH region as depicted in SEQ ID NO. 204;
(q) a VL region as depicted in SEQ ID NO. 216 and a VH region as depicted in SEQ ID NO. 215;
(r) a VL region as depicted in SEQ ID NO. 227 and a VH region as depicted in SEQ ID NO. 226;
(s) a VL region as depicted in SEQ ID NO. 238 and a VH region as depicted in SEQ ID NO. 237;
(t) a VL region as depicted in SEQ ID NO. 249 and a VH region as depicted in SEQ ID NO. 248;
(u) a VL region as depicted in SEQ ID NO. 260 and a VH region as depicted in SEQ ID NO. 259;
(v) a VL region as depicted in SEQ ID NO. 271 and a VH region as depicted in SEQ ID NO. 270;
(w) a VL region as depicted in SEQ ID NO. 282 and a VH region as depicted in SEQ ID NO. 281,
(x) a VL region as depicted in SEQ ID NO. 293 and a VH region as depicted in SEQ ID NO. 292;
(y) a VL region as depicted in SEQ ID NO. 304 and a VH region as depicted in SEQ ID NO. 303;
(z) a VL region as depicted in SEQ ID NO. 315 and a VH region as depicted in SEQ ID NO. 314;
(aa) a VL region as depicted in SEQ ID NO. 326 and a VH region as depicted in SEQ ID NO. 325;
(ab) a VL region as depicted in SEQ ID NO. 337 and a VH region as depicted in SEQ ID NO. 336;
(ac) a VL region as depicted in SEQ ID NO. 348 and a VH region as depicted in SEQ ID NO. 347;
(ad) a VL region as depicted in SEQ ID NO. 359 and a VH region as depicted in SEQ ID NO. 358;
(ae) a VL region as depicted in SEQ ID NO. 370 and a VH region as depicted in SEQ ID NO. 369;
(af) a VL region as depicted in SEQ ID NO. 381 and a VH region as depicted in SEQ ID NO. 380;
(ag) a VL region as depicted in SEQ ID NO. 392 and a VH region as depicted in SEQ ID NO. 391;
(ah) a VL region as depicted in SEQ ID NO. 403 and a VH region as depicted in SEQ ID NO. 402;
(ai) a VL region as depicted in SEQ ID NO. 414 and a VH region as depicted in SEQ ID NO. 413;
(aj) a VL region as depicted in SEQ ID NO. 425 and a VH region as depicted in SEQ ID NO. 424;
(ak) a VL region as depicted in SEQ ID NO. 436 and a VH region as depicted in SEQ ID NO. 435;
(al) a VL region as depicted in SEQ ID NO. 447 and a VH region as depicted in SEQ ID NO. 446;
(am) a VL region as depicted in SEQ ID NO. 458 and a VH region as depicted in SEQ ID NO. 457;
(an) a VL region as depicted in SEQ ID NO. 469 and a VH region as depicted in SEQ ID NO. 468;
(ao) a VL region as depicted in SEQ ID NO. 480 and a VH region as depicted in SEQ ID NO. 479;
(ap) a VL region as depicted in SEQ ID NO. 491 and a VH region as depicted in SEQ ID NO. 490;
(aq) a VL region as depicted in SEQ ID NO. 502 and a VH region as depicted in SEQ ID NO. 501;
(ar) a VL region as depicted in SEQ ID NO. 513 and a VH region as depicted in SEQ ID NO. 512; and
(as) a VL region as depicted in SEQ ID NO. 524 and a VH region as depicted in SEQ ID NO. 523.

24. The bispecific antibody construct of claim 1, wherein the antibody construct comprises an amino acid sequence selected from the group consisting of SEQ ID NOs: 41, 52, 63, 74, 85, 96, 107, 118, 129, 140, 151, 162, 173, 184, 195, 206, 217, 228, 239, 250, 261, 272, 283, 294, 305, 316, 327, 338, 349, 360, 371, 382, 393, 404, 415, 426, 437, 448, 459, 470, 481, 492, 503, 514, and 525.

25. The bispecific antibody construct of claim 1, wherein the antibody construct comprises in an amino to carboxyl order:
(a) the first domain having an amino acid sequence selected from the group consisting of SEQ ID NOs: 41, 52, 63, 74, 85, 96, 107, 118, 129, 140, 151, 162, 173, 184, 195, 206, 217, 228, 239, 250, 261, 272, 283, 294, 305, 316, 327, 338, 349, 360, 371, 382, 393, 404, 415, 426, 437, 448, 459, 470, 481, 492, 503, 514, and 525;
(b) a peptide linker having an amino acid sequence selected from the group consisting of SEQ ID NOs: 1-3; and
(c) the second domain having an amino acid sequence selected from the group consisting of SEQ ID NOs: 586-605 and 15.

26. The bispecific antibody construct of claim 25, wherein the antibody construct further comprises in an amino to carboxyl order:
(d) a peptide linker having an amino acid sequence selected from the group consisting of SEQ ID NOs: 1, 2, 3, 9, 10, 11 and 12;
(e) the first polypeptide monomer of the third domain having a polypeptide sequence selected from the group consisting of SEQ ID NOs: 17-24;
(f) a peptide linker having an amino acid sequence selected from the group consisting of SEQ ID NOs: 5, 6, 7 and 8; and
(g) the second polypeptide monomer of the third domain having a polypeptide sequence selected from the group consisting of SEQ ID NOs: 17-24.

27. The bispecific antibody construct of claim 1 comprising
(a) an amino acid sequence selected from the group consisting of SEQ ID NOs: 42, 43, 53, 54, 64, 65, 75, 76, 86, 87, 97, 98, 108, 109, 119, 120, 130, 131, 141, 142, 152, 153, 163, 164, 174, 175, 185, 186, 196, 197, 207, 208, 218, 219, 229, 230, 240, 241, 251, 252, 262, 263, 273, 274, 284, 285, 295, 296, 306, 307, 317, 318, 328, 329, 339, 340, 350, 351, 361, 362, 372, 373, 383, 384, 394, 395, 405, 406, 416, 417, 427, 428, 438, 439, 449, 450, 460, 461, 471, 472, 482, 483, 493, 494, 504, 505, 515, 516, 526 and 527, or
(b) an amino acid sequence comprising at least 90% identity to the amino acid sequence of (a).

28. A polynucleotide encoding the antibody construct of claim 1.

29. A vector comprising the polynucleotide of claim 28.

30. A host cell transformed or transfected with the polynucleotide of claim 28.

31. A process for producing a bispecific antibody construct, said process comprising culturing the host cell of claim 30 under conditions allowing the expression of the bispecific antibody construct.

32. A pharmaceutical composition comprising the bispecific antibody construct of claim 1.

33-36. (canceled)

37. A method for treating or ameliorating a proliferative disease, a tumorous disease, a cancer, or an immunological disorder, comprising the step of administering to a subject in need thereof the bispecific antibody construct of claim 1, wherein the disease is a gastrointestinal cancer, a pancreatic cancer, or a gastric cancer.

38. A kit comprising the bispecific antibody construct of claim 1 and a means for reconstituting or diluting the antibody construct.

39-40. (canceled)

The application's sequence listing, which the Patent Office published only in electronic form, follows.

SEQUENCE LISTING (535 sequences)

SEQ ID NO: 1 - protein, 5 aa, Artificial Sequence
  Synthetic Polypeptide
  MISC_FEATURE: G4S linker
GGGGS

SEQ ID NO: 2 - protein, 10 aa, Artificial Sequence
  Synthetic Polypeptide
  MISC_FEATURE: (G4S)2 linker
GGGGSGGGGS

SEQ ID NO: 3 - protein, 15 aa, Artificial Sequence
  Synthetic Polypeptide
  MISC_FEATURE: (G4S)3 linker
GGGGSGGGGSGGGGS

SEQ ID NO: 4 - protein, 20 aa, Artificial Sequence
  Synthetic Polypeptide
  MISC_FEATURE: (G4S)4 linker
GGGGSGGGGSGGGGSGGGGS

SEQ ID NO: 5 - protein, 25 aa, Artificial Sequence
  Synthetic Polypeptide
  MISC_FEATURE: (G4S)5 linker
GGGGSGGGGSGGGGSGGGGSGGGGS

SEQ ID NO: 6 - protein, 30 aa, Artificial Sequence
  Synthetic Polypeptide
  MISC_FEATURE: (G4S)6 linker
GGGGSGGGGSGGGGSGGGGSGGGGSGGGGS

SEQ ID NO: 7 - protein, 35 aa, Artificial Sequence
  Synthetic Polypeptide
  MISC_FEATURE: (G4S)7 linker
GGGGSGGGGSGGGGSGGGGSGGGGSGGGGSGGGGS

SEQ ID NO: 8 - protein, 40 aa, Artificial Sequence
  Synthetic Polypeptide
  MISC_FEATURE: (G4S)8 linker
GGGGSGGGGSGGGGSGGGGSGGGGSGGGGSGGGGSGGGGS

SEQ ID NO: 9 - protein, 6 aa, Artificial Sequence
  Synthetic Polypeptide
  MISC_FEATURE: Peptide linker
PGGGGS

SEQ ID NO: 10 - protein, 6 aa, Artificial Sequence
  Synthetic Polypeptide
  MISC_FEATURE: Peptide linker
PGGDGS

SEQ ID NO: 11 - protein, 6 aa, Artificial Sequence
  Synthetic Polypeptide
  MISC_FEATURE: Peptide linker
SGGGGS

SEQ ID NO: 12 - protein, 4 aa, Artificial Sequence
  Synthetic Polypeptide
  MISC_FEATURE: Peptide linker
GGGG

SEQ ID NO: 13 - protein, 109 aa, Artificial Sequence
  Synthetic Polypeptide
  MISC_FEATURE: CD3? binder VL
QTVVTQEPSLTVSPGGTVTLTCGSSTGAVTSGNYPNWVQQKPGQAPRGLIGGTKFLAPGTPARFSGSLLGGKAALTLSGVQPEDEAEYYCVLWYSNRWVFGGGTKLTVL

SEQ ID NO: 14 - protein, 125 aa, Artificial Sequence
  Synthetic Polypeptide
  MISC_FEATURE: CD3? binder VH
EVQLVESGGGLVQPGGSLRLSCAASGFTFNSYAMNWVRQAPGKGLEWVARIRSKYNNYATYYADSVKGRFTISRDDSKNTAYLQMNSLKTEDTAVYYCVRHGNFGNSYVSWWAYWGQGTLVTVSS

SEQ ID NO: 15 - protein, 249 aa, Artificial Sequence
  Synthetic Polypeptide
  MISC_FEATURE: CD3? binder scFv
EVQLVESGGGLVQPGGSLRLSCAASGFTFNSYAMNWVRQAPGKGLEWVARIRSKYNNYATYYADSVKGRFTISRDDSKNTAYLQMNSLKTEDTAVYYCVRHGNFGNSYVSWWAYWGQGTLVTVSSGGGGSGGGGSGGGGSQTVVTQEPSLTVSPGGTVTLTCGSSTGAVTSGNYPNWVQQKPGQAPRGLIGGTKFLAPGTPARFSGSLLGGKAALTLSGVQPEDEAEYYCVLWYSNRWVFGGGTKLTVL

SEQ ID NO: 16 - protein, 6 aa, Artificial Sequence
  Synthetic Polypeptide
  MISC_FEATURE: hexa-histidine tag
HHHHHH

SEQ ID NO: 17 - protein, 227 aa, Artificial Sequence
  Synthetic Polypeptide
  MISC_FEATURE: Fc monomer-1 +c/-g
DKTHTCPPCPAPELLGGPSVFLFPPKPKDTLMISRTPEVTCVVVDVSHEDPEVKFNWYVDGVEVHNAKTKPCEEQYGSTYRCVSVLTVLHQDWLNGKEYKCKVSNKALPAPIEKTISKAKGQPREPQVYTLPPSREEMTKNQVSLTCLVKGFYPSDIAVEWESNGQPENNYKTTPPVLDSDGSFFLYSKLTVDKSRWQQGNVFSCSVMHEALHNHYTQKSLSLSPGK

SEQ ID NO: 18 - protein, 225 aa, Artificial Sequence
  Synthetic Polypeptide
  MISC_FEATURE: Fc monomer-2 +c/-g/delGK
DKTHTCPPCPAPELLGGPSVFLFPPKPKDTLMISRTPEVTCVVVDVSHEDPEVKFNWYVDGVEVHNAKTKPCEEQYGSTYRCVSVLTVLHQDWLNGKEYKCKVSNKALPAPIEKTISKAKGQPREPQVYTLPPSREEMTKNQVSLTCLVKGFYPSDIAVEWESNGQPENNYKTTPPVLDSDGSFFLYSKLTVDKSRWQQGNVFSCSVMHEALHNHYTQKSLSLSP

SEQ ID NO: 19 - protein, 227 aa, Artificial Sequence
  Synthetic Polypeptide
  MISC_FEATURE: Fc monomer-3 -c/+g
DKTHTCPPCPAPELLGGPSVFLFPPKPKDTLMISRTPEVTCVVVDVSHEDPEVKFNWYVDGVEVHNAKTKPREEQYNSTYRVVSVLTVLHQDWLNGKEYKCKVSNKALPAPIEKTISKAKGQPREPQVYTLPPSREEMTKNQVSLTCLVKGFYPSDIAVEWESNGQPENNYKTTPPVLDSDGSFFLYSKLTVDKSRWQQGNVFSCSVMHEALHNHYTQKSLSLSPGK

SEQ ID NO: 20 - protein, 225 aa, Artificial Sequence
  Synthetic Polypeptide
  MISC_FEATURE: Fc monomer-4 -c/+g/delGK
DKTHTCPPCPAPELLGGPSVFLFPPKPKDTLMISRTPEVTCVVVDVSHEDPEVKFNWYVDGVEVHNAKTKPREEQYNSTYRVVSVLTVLHQDWLNGKEYKCKVSNKALPAPIEKTISKAKGQPREPQVYTLPPSREEMTKNQVSLTCLVKGFYPSDIAVEWESNGQPENNYKTTPPVLDSDGSFFLYSKLTVDKSRWQQGNVFSCSVMHEALHNHYTQKSLSLSP

SEQ ID NO: 21 - protein, 227 aa, Artificial Sequence
  Synthetic Polypeptide
  MISC_FEATURE: Fc monomer-5 -c/-g
DKTHTCPPCPAPELLGGPSVFLFPPKPKDTLMISRTPEVTCVVVDVSHEDPEVKFNWYVDGVEVHNAKTKPREEQYGSTYRVVSVLTVLHQDWLNGKEYKCKVSNKALPAPIEKTISKAKGQPREPQVYTLPPSREEMTKNQVSLTCLVKGFYPSDIAVEWESNGQPENNYKTTPPVLDSDGSFFLYSKLTVDKSRWQQGNVFSCSVMHEALHNHYTQKSLSLSPGK

SEQ ID NO: 22 - protein, 225 aa, Artificial Sequence
  Synthetic Polypeptide
  MISC_FEATURE: Fc monomer-6 -c/-g/delGK
DKTHTCPPCPAPELLGGPSVFLFPPKPKDTLMISRTPEVTCVVVDVSHEDPEVKFNWYVDGVEVHNAKTKPREEQYGSTYRVVSVLTVLHQDWLNGKEYKCKVSNKALPAPIEKTISKAKGQPREPQVYTLPPSREEMTKNQVSLTCLVKGFYPSDIAVEWESNGQPENNYKTTPPVLDSDGSFFLYSKLTVDKSRWQQGNVFSCSVMHEALHNHYTQKSLSLSP

SEQ ID NO: 23 - protein, 227 aa, Artificial Sequence
  Synthetic Polypeptide
  MISC_FEATURE: Fc monomer-7 +c/+g
DKTHTCPPCPAPELLGGPSVFLFPPKPKDTLMISRTPEVTCVVVDVSHEDPEVKFNWYVDGVEVHNAKTKPCEEQYNSTYRCVSVLTVLHQDWLNGKEYKCKVSNKALPAPIEKTISKAKGQPREPQVYTLPPSREEMTKNQVSLTCLVKGFYPSDIAVEWESNGQPENNYKTTPPVLDSDGSFFLYSKLTVDKSRWQQGNVFSCSVMHEALHNHYTQKSLSLSPGK

SEQ ID NO: 24 - protein, 225 aa, Artificial Sequence
  Synthetic Polypeptide
  MISC_FEATURE: Fc monomer-8 +c/+g/delGK
DKTHTCPPCPAPELLGGPSVFLFPPKPKDTLMISRTPEVTCVVVDVSHEDPEVKFNWYVDGVEVHNAKTKPCEEQYNSTYRCVSVLTVLHQDWLNGKEYKCKVSNKALPAPIEKTISKAKGQPREPQVYTLPPSREEMTKNQVSLTCLVKGFYPSDIAVEWESNGQPENNYKTTPPVLDSDGSFFLYSKLTVDKSRWQQGNVFSCSVMHEALHNHYTQKSLSLSP

SEQ ID NO: 25 - protein, 484 aa, Artificial Sequence
  Synthetic Polypeptide
  MISC_FEATURE: scFc-1
DKTHTCPPCPAPELLGGPSVFLFPPKPKDTLMISRTPEVTCVVVDVSHEDPEVKFNWYVDGVEVHNAKTKPCEEQYGSTYRCVSVLTVLHQDWLNGKEYKCKVSNKALPAPIEKTISKAKGQPREPQVYTLPPSREEMTKNQVSLTCLVKGFYPSDIAVEWESNGQPENNYKTTPPVLDSDGSFFLYSKLTVDKSRWQQGNVFSCSVMHEALHNHYTQKSLSLSPGKGGGGSGGGGSGGGGSGGGGSGGGGSGGGGSDKTHTCPPCPAPELLGGPSVFLFPPKPKDTLMISRTPEVTCVVVDVSHEDPEVKFNWYVDGVEVHNAKTKPCEEQYGSTYRCVSVLTVLHQDWLNGKEYKCKVSNKALPAPIEKTISKAKGQPREPQVYTLPPSREEMTKNQVSLTCLVKGFYPSDIAVEWESNGQPENNYKTTPPVLDSDGSFFLYSKLTVDKSRWQQGNVFSCSVMHEALHNHYTQKSLSLSPGK

SEQ ID NO: 26 - protein, 480 aa, Artificial Sequence
  Synthetic Polypeptide
  MISC_FEATURE: scFc-2
DKTHTCPPCPAPELLGGPSVFLFPPKPKDTLMISRTPEVTCVVVDVSHEDPEVKFNWYVDGVEVHNAKTKPCEEQYGSTYRCVSVLTVLHQDWLNGKEYKCKVSNKALPAPIEKTISKAKGQPREPQVYTLPPSREEMTKNQVSLTCLVKGFYPSDIAVEWESNGQPENNYKTTPPVLDSDGSFFLYSKLTVDKSRWQQGNVFSCSVMHEALHNHYTQKSLSLSPGGGGSGGGGSGGGGSGGGGSGGGGSGGGGSDKTHTCPPCPAPELLGGPSVFLFPPKPKDTLMISRTPEVTCVVVDVSHEDPEVKFNWYVDGVEVHNAKTKPCEEQYGSTYRCVSVLTVLHQDWLNGKEYKCKVSNKALPAPIEKTISKAKGQPREPQVYTLPPSREEMTKNQVSLTCLVKGFYPSDIAVEWESNGQPENNYKTTPPVLDSDGSFFLYSKLTVDKSRWQQGNVFSCSVMHEALHNHYTQKSLSLSP

SEQ ID NO: 27 - protein, 484 aa, Artificial Sequence
  Synthetic Polypeptide
  MISC_FEATURE: scFc-3
DKTHTCPPCPAPELLGGPSVFLFPPKPKDTLMISRTPEVTCVVVDVSHEDPEVKFNWYVDGVEVHNAKTKPREEQYNSTYRVVSVLTVLHQDWLNGKEYKCKVSNKALPAPIEKTISKAKGQPREPQVYTLPPSREEMTKNQVSLTCLVKGFYPSDIAVEWESNGQPENNYKTTPPVLDSDGSFFLYSKLTVDKSRWQQGNVFSCSVMHEALHNHYTQKSLSLSPGKGGGGSGGGGSGGGGSGGGGSGGGGSGGGGSDKTHTCPPCPAPELLGGPSVFLFPPKPKDTLMISRTPEVTCVVVDVSHEDPEVKFNWYVDGVEVHNAKTKPREEQYNSTYRVVSVLTVLHQDWLNGKEYKCKVSNKALPAPIEKTISKAKGQPREPQVYTLPPSREEMTKNQVSLTCLVKGFYPSDIAVEWESNGQPENNYKTTPPVLDSDGSFFLYSKLTVDKSRWQQGNVFSCSVMHEALHNHYTQKSLSLSPGK

SEQ ID NO: 28 - protein, 480 aa, Artificial Sequence
  Synthetic Polypeptide
  MISC_FEATURE: scFc-4
DKTHTCPPCPAPELLGGPSVFLFPPKPKDTLMISRTPEVTCVVVDVSHEDPEVKFNWYVDGVEVHNAKTKPREEQYNSTYRVVSVLTVLHQDWLNGKEYKCKVSNKALPAPIEKTISKAKGQPREPQVYTLPPSREEMTKNQVSLTCLVKGFYPSDIAVEWESNGQPENNYKTTPPVLDSDGSFFLYSKLTVDKSRWQQGNVFSCSVMHEALHNHYTQKSLSLSPGGGGSGGGGSGGGGSGGGGSGGGGSGGGGSDKTHTCPPCPAPELLGGPSVFLFPPKPKDTLMISRTPEVTCVVVDVSHEDPEVKFNWYVDGVEVHNAKTKPREEQYNSTYRVVSVLTVLHQDWLNGKEYKCKVSNKALPAPIEKTISKAKGQPREPQVYTLPPSREEMTKNQVSLTCLVKGFYPSDIAVEWESNGQPENNYKTTPPVLDSDGSFFLYSKLTVDKSRWQQGNVFSCSVMHEALHNHYTQKSLSLSP

SEQ ID NO: 29 - protein, 484 aa, Artificial Sequence
  Synthetic Polypeptide
  MISC_FEATURE: scFc-5
DKTHTCPPCPAPELLGGPSVFLFPPKPKDTLMISRTPEVTCVVVDVSHEDPEVKFNWYVDGVEVHNAKTKPREEQYGSTYRVVSVLTVLHQDWLNGKEYKCKVSNKALPAPIEKTISKAKGQPREPQVYTLPPSREEMTKNQVSLTCLVKGFYPSDIAVEWESNGQPENNYKTTPPVLDSDGSFFLYSKLTVDKSRWQQGNVFSCSVMHEALHNHYTQKSLSLSPGKGGGGSGGGGSGGGGSGGGGSGGGGSGGGGSDKTHTCPPCPAPELLGGPSVFLFPPKPKDTLMISRTPEVTCVVVDVSHEDPEVKFNWYVDGVEVHNAKTKPREEQYGSTYRVVSVLTVLHQDWLNGKEYKCKVSNKALPAPIEKTISKAKGQPREPQVYTLPPSREEMTKNQVSLTCLVKGFYPSDIAVEWESNGQPENNYKTTPPVLDSDGSFFLYSKLTVDKSRWQQGNVFSCSVMHEALHNHYTQKSLSLSPGK

SEQ ID NO: 30 - protein, 480 aa, Artificial Sequence
  Synthetic Polypeptide
  MISC_FEATURE: scFc-6
DKTHTCPPCPAPELLGGPSVFLFPPKPKDTLMISRTPEVTCVVVDVSHEDPEVKFNWYVDGVEVHNAKTKPREEQYGSTYRVVSVLTVLHQDWLNGKEYKCKVSNKALPAPIEKTISKAKGQPREPQVYTLPPSREEMTKNQVSLTCLVKGFYPSDIAVEWESNGQPENNYKTTPPVLDSDGSFFLYSKLTVDKSRWQQGNVFSCSVMHEALHNHYTQKSLSLSPGGGGSGGGGSGGGGSGGGGSGGGGSGGGGSDKTHTCPPCPAPELLGGPSVFLFPPKPKDTLMISRTPEVTCVVVDVSHEDPEVKFNWYVDGVEVHNAKTKPREEQYGSTYRVVSVLTVLHQDWLNGKEYKCKVSNKALPAPIEKTISKAKGQPREPQVYTLPPSREEMTKNQVSLTCLVKGFYPSDIAVEWESNGQPENNYKTTPPVLDSDGSFFLYSKLTVDKSRWQQGNVFSCSVMHEALHNHYTQKSLSLSP

SEQ ID NO: 31 - protein, 484 aa, Artificial Sequence
  Synthetic Polypeptide
  MISC_FEATURE: scFc-7
DKTHTCPPCPAPELLGGPSVFLFPPKPKDTLMISRTPEVTCVVVDVSHEDPEVKFNWYVDGVEVHNAKTKPCEEQYNSTYRCVSVLTVLHQDWLNGKEYKCKVSNKALPAPIEKTISKAKGQPREPQVYTLPPSREEMTKNQVSLTCLVKGFYPSDIAVEWESNGQPENNYKTTPPVLDSDGSFFLYSKLTVDKSRWQQGNVFSCSVMHEALHNHYTQKSLSLSPGKGGGGSGGGGSGGGGSGGGGSGGGGSGGGGSDKTHTCPPCPAPELLGGPSVFLFPPKPKDTLMISRTPEVTCVVVDVSHEDPEVKFNWYVDGVEVHNAKTKPCEEQYNSTYRCVSVLTVLHQDWLNGKEYKCKVSNKALPAPIEKTISKAKGQPREPQVYTLPPSREEMTKNQVSLTCLVKGFYPSDIAVEWESNGQPENNYKTTPPVLDSDGSFFLYSKLTVDKSRWQQGNVFSCSVMHEALHNHYTQKSLSLSPGK

SEQ ID NO: 32 - protein, 480 aa, Artificial Sequence
  Synthetic Polypeptide
  MISC_FEATURE: scFc-8
DKTHTCPPCPAPELLGGPSVFLFPPKPKDTLMISRTPEVTCVVVDVSHEDPEVKFNWYVDGVEVHNAKTKPCEEQYNSTYRCVSVLTVLHQDWLNGKEYKCKVSNKALPAPIEKTISKAKGQPREPQVYTLPPSREEMTKNQVSLTCLVKGFYPSDIAVEWESNGQPENNYKTTPPVLDSDGSFFLYSKLTVDKSRWQQGNVFSCSVMHEALHNHYTQKSLSLSPGGGGSGGGGSGGGGSGGGGSGGGGSGGGGSDKTHTCPPCPAPELLGGPSVFLFPPKPKDTLMISRTPEVTCVVVDVSHEDPEVKFNWYVDGVEVHNAKTKPCEEQYNSTYRCVSVLTVLHQDWLNGKEYKCKVSNKALPAPIEKTISKAKGQPREPQVYTLPPSREEMTKNQVSLTCLVKGFYPSDIAVEWESNGQPENNYKTTPPVLDSDGSFFLYSKLTVDKSRWQQGNVFSCSVMHEALHNHYTQKSLSLSP

SEQ ID NO: 33 - protein, 5 aa, Artificial Sequence
  Synthetic Polypeptide
  MISC_FEATURE: MU 92-G6 CC x I2C0-scFc VH CDR1
SYGMH

SEQ ID NO: 34 - protein, 17 aa, Artificial Sequence
  Synthetic Polypeptide
  MISC_FEATURE: MU 92-G6 CC x I2C0-scFc VH CDR2
VISFEGSNKYYASSVKG

SEQ ID NO: 35 - protein, 9 aa, Artificial Sequence
  Synthetic Polypeptide
  MISC_FEATURE: MU 92-G6 CC x I2C0-scFc VH CDR3
GAYTYGFDY

SEQ ID NO: 36 - protein, 11 aa, Artificial Sequence
  Synthetic Polypeptide
  MISC_FEATURE: MU 92-G6 CC x I2C0-scFc VL CDR1
RASQSVNRYLA

SEQ ID NO: 37 - protein, 7 aa, Artificial Sequence
  Synthetic Polypeptide
  MISC_FEATURE: MU 92-G6 CC x I2C0-scFc VL CDR2
GASNRAT

SEQ ID NO: 38 - protein, 9 aa, Artificial Sequence
  Synthetic Polypeptide
  MISC_FEATURE: MU 92-G6 CC x I2C0-scFc VL CDR3
HHYGSSIFA

SEQ ID NO: 39 - protein, 118 aa, Artificial Sequence
  Synthetic Polypeptide
  MISC_FEATURE: MU 92-G6 CC x I2C0-scFc VH
QVQLVESGGGVVQPGRSLRLSCAASGFTFSSYGMHWVRQAPGKCLEWVAVISFEGSNKYYASSVKGRFTISRDNSKNTLYLQMNSLRAEDTAVYYCARGAYTYGFDYWGQGTLVTVSS

SEQ ID NO: 40 - protein, 107 aa, Artificial Sequence
  Synthetic Polypeptide
  MISC_FEATURE: MU 92-G6 CC x I2C0-scFc VL
EIVLTQSPGTLSLSPGERATLSCRASQSVNRYLAWYQQKPGQAPRLLIYGASNRATGIPDRFTGSGSGTDFTLTISRLEPEDFAVYFCHHYGSSIFAFGCGTKVEIK

SEQ ID NO: 41 - protein, 240 aa, Artificial Sequence
  Synthetic Polypeptide
  MISC_FEATURE: MU 92-G6 CC x I2C0-scFc scFv
QVQLVESGGGVVQPGRSLRLSCAASGFTFSSYGMHWVRQAPGKCLEWVAVISFEGSNKYYASSVKGRFTISRDNSKNTLYLQMNSLRAEDTAVYYCARGAYTYGFDYWGQGTLVTVSSGGGGSGGGGSGGGGSEIVLTQSPGTLSLSPGERATLSCRASQSVNRYLAWYQQKPGQAPRLLIYGASNRATGIPDRFTGSGSGTDFTLTISRLEPEDFAVYFCHHYGSSIFAFGCGTKVEIK

SEQ ID NO: 42 - protein, 495 aa, Artificial Sequence
  Synthetic Polypeptide
  MISC_FEATURE: MU 92-G6 CC x I2C0-scFc Bispecific molecule
QVQLVESGGGVVQPGRSLRLSCAASGFTFSSYGMHWVRQAPGKCLEWVAVISFEGSNKYYASSVKGRFTISRDNSKNTLYLQMNSLRAEDTAVYYCARGAYTYGFDYWGQGTLVTVSSGGGGSGGGGSGGGGSEIVLTQSPGTLSLSPGERATLSCRASQSVNRYLAWYQQKPGQAPRLLIYGASNRATGIPDRFTGSGSGTDFTLTISRLEPEDFAVYFCHHYGSSIFAFGCGTKVEIKSGGGGSEVQLVESGGGLVQPGGSLKLSCAASGFTFNKYAMNWVRQAPGKGLEWVARIRSKYNNYATYYADSVKDRFTISRDDSKNTAYLQMNNLKTEDTAVYYCVRHGNFGNSYISYWAYWGQGTLVTVSSGGGGSGGGGSGGGGSQTVVTQEPSLTVSPGGTVTLTCGSSTGAVTSGNYPNWVQQKPGQAPRGLIGGTKFLAPGTPARFSGSLLGGKAALTLSGVQPEDEAEYYCVLWYSNRWVFGGGTKLTVL

SEQ ID NO: 43 - protein, 983 aa, Artificial Sequence
  Synthetic Polypeptide
  MISC_FEATURE: MU 92-G6 CC x I2C0-scFc Bispecific HLE molecule
QVQLVESGGGVVQPGRSLRLSCAASGFTFSSYGMHWVRQAPGKCLEWVAVISFEGSNKYYASSVKGRFTISRDNSKNTLYLQMNSLRAEDTAVYYCARGAYTYGFDYWGQGTLVTVSSGGGGSGGGGSGGGGSEIVLTQSPGTLSLSPGERATLSCRASQSVNRYLAWYQQKPGQAPRLLIYGASNRATGIPDRFTGSGSGTDFTLTISRLEPEDFAVYFCHHYGSSIFAFGCGTKVEIKSGGGGSEVQLVESGGGLVQPGGSLKLSCAASGFTFNKYAMNWVRQAPGKGLEWVARIRSKYNNYATYYADSVKDRFTISRDDSKNTAYLQMNNLKTEDTAVYYCVRHGNFGNSYISYWAYWGQGTLVTVSSGGGGSGGGGSGGGGSQTVVTQEPSLTVSPGGTVTLTCGSSTGAVTSGNYPNWVQQKPGQAPRGLIGGTKFLAPGTPARFSGSLLGGKAALTLSGVQPEDEAEYYCVLWYSNRWVFGGGTKLTVLGGGGDKTHTCPPCPAPELLGGPSVFLFPPKPKDTLMISRTPEVTCVVVDVSHEDPEVKFNWYVDGVEVHNAKTKPCEEQYGSTYRCVSVLTVLHQDWLNGKEYKCKVSNKALPAPIEKTISKAKGQPREPQVYTLPPSREEMTKNQVSLTCLVKGFYPSDIAVEWESNGQPENNYKTTPPVLDSDGSFFLYSKLTVDKSRWQQGNVFSCSVMHEALHNHYTQKSLSLSPGKGGGGSGGGGSGGGGSGGGGSGGGGSGGGGSDKTHTCPPCPAPELLGGPSVFLFPPKPKDTLMISRTPEVTCVVVDVSHEDPEVKFNWYVDGVEVHNAKTKPCEEQYGSTYRCVSVLTVLHQDWLNGKEYKCKVSNKALPAPIEKTISKAKGQPREPQVYTLPPSREEMTKNQVSLTCLVKGFYPSDIAVEWESNGQPENNYKTTPPVLDSDGSFFLYSKLTVDKSRWQQGNVFSCSVMHEALHNHYTQKSLSLSPGK

SEQ ID NO: 44 - protein, 5 aa, Artificial Sequence
  Synthetic Polypeptide
  MISC_FEATURE: MU 92-C12 CC x I2C0-scFc VH CDR1
SFGMH

SEQ ID NO: 45 - protein, 17 aa, Artificial Sequence
  Synthetic Polypeptide
  MISC_FEATURE: MU 92-C12 CC x I2C0-scFc VH CDR2
VIWFSGSNKYYAEAVKG

SEQ ID NO: 46 - protein, 9 aa, Artificial Sequence
  Synthetic Polypeptide
  MISC_FEATURE: MU 92-C12 CC x I2C0-scFc VH CDR3
GGYTYGFDY

SEQ ID NO: 47 - protein, 11 aa, Artificial Sequence
  Synthetic Polypeptide
  MISC_FEATURE: MU 92-C12 CC x I2C0-scFc VL CDR1
RANQAINRYLA

SEQ ID NO: 48 - protein, 7 aa, Artificial Sequence
  Synthetic Polypeptide
  MISC_FEATURE: MU 92-C12 CC x I2C0-scFc VL CDR2
GASSRAT

SEQ ID NO: 49 - protein, 9 aa, Artificial Sequence
  Synthetic Polypeptide
  MISC_FEATURE: MU 92-C12 CC x I2C0-scFc VL CDR3
HHYGSSIFT

SEQ ID NO: 50 - protein, 118 aa, Artificial Sequence
  Synthetic Polypeptide
  MISC_FEATURE: MU 92-C12 CC x I2C0-scFc VH
QVQLVESGGGVVQPGRSLRLSCAASGFTFSSFGMHWVRQAPGKCLEWVAVIWFSGSNKYYAEAVKGRFTISRDNSKNTLYLQMNNLRAEDTAVYYCARGGYTYGFDYWGQGTLVTVSS

SEQ ID NO: 51 - protein, 107 aa, Artificial Sequence
  Synthetic Polypeptide
  MISC_FEATURE: MU 92-C12 CC x I2C0-scFc VL
EIVLTQSPATLSLSPGERATLSCRANQAINRYLAWYQQKPGQAPRLLIYGASSRATGIPDRFSGSGSGTDFTLTISRLEPEDFAVYYCHHYGSSIFTFGCGTKVEIK

SEQ ID NO: 52 - protein, 240 aa, Artificial Sequence
  Synthetic Polypeptide
  MISC_FEATURE: MU 92-C12 CC x I2C0-scFc scFv
QVQLVESGGGVVQPGRSLRLSCAASGFTFSSFGMHWVRQAPGKCLEWVAVIWFSGSNKYYAEAVKGRFTISRDNSKNTLYLQMNNLRAEDTAVYYCARGGYTYGFDYWGQGTLVTVSSGGGGSGGGGSGGGGSEIVLTQSPATLSLSPGERATLSCRANQAINRYLAWYQQKPGQAPRLLIYGASSRATGIPDRFSGSGSGTDFTLTISRLEPEDFAVYYCHHYGSSIFTFGCGTKVEIK

SEQ ID NO: 53 - protein, 495 aa, Artificial Sequence
  Synthetic Polypeptide
  MISC_FEATURE: MU 92-C12 CC x I2C0-scFc Bispecific molecule
QVQLVESGGGVVQPGRSLRLSCAASGFTFSSFGMHWVRQAPGKCLEWVAVIWFSGSNKYYAEAVKGRFTISRDNSKNTLYLQMNNLRAEDTAVYYCARGGYTYGFDYWGQGTLVTVSSGGGGSGGGGSGGGGSEIVLTQSPATLSLSPGERATLSCRANQAINRYLAWYQQKPGQAPRLLIYGASSRATGIPDRFSGSGSGTDFTLTISRLEPEDFAVYYCHHYGSSIFTFGCGTKVEIKSGGGGSEVQLVESGGGLVQPGGSLKLSCAASGFTFNKYAMNWVRQAPGKGLEWVARIRSKYNNYATYYADSVKDRFTISRDDSKNTAYLQMNNLKTEDTAVYYCVRHGNFGNSYISYWAYWGQGTLVTVSSGGGGSGGGGSGGGGSQTVVTQEPSLTVSPGGTVTLTCGSSTGAVTSGNYPNWVQQKPGQAPRGLIGGTKFLAPGTPARFSGSLLGGKAALTLSGVQPEDEAEYYCVLWYSNRWVFGGGTKLTVL

SEQ ID NO: 54 - protein, 983 aa, Artificial Sequence
  Synthetic Polypeptide
  MISC_FEATURE: MU 92-C12 CC x I2C0-scFc Bispecific HLE molecule
QVQLVESGGGVVQPGRSLRLSCAASGFTFSSFGMHWVRQAPGKCLEWVAVIWFSGSNKYYAEAVKGRFTISRDNSKNTLYLQMNNLRAEDTAVYYCARGGYTYGFDYWGQGTLVTVSSGGGGSGGGGSGGGGSEIVLTQSPATLSLSPGERATLSCRANQAINRYLAWYQQKPGQAPRLLIYGASSRATGIPDRFSGSGSGTDFTLTISRLEPEDFAVYYCHHYGSSIFTFGCGTKVEIKSGGGGSEVQLVESGGGLVQPGGSLKLSCAASGFTFNKYAMNWVRQAPGKGLEWVARIRSKYNNYATYYADSVKDRFTISRDDSKNTAYLQMNNLKTEDTAVYYCVRHGNFGNSYISYWAYWGQGTLVTVSSGGGGSGGGGSGGGGSQTVVTQEPSLTVSPGGTVTLTCGSSTGAVTSGNYPNWVQQKPGQAPRGLIGGTKFLAPGTPARFSGSLLGGKAALTLSGVQPEDEAEYYCVLWYSNRWVFGGGTKLTVLGGGGDKTHTCPPCPAPELLGGPSVFLFPPKPKDTLMISRTPEVTCVVVDVSHEDPEVKFNWYVDGVEVHNAKTKPCEEQYGSTYRCVSVLTVLHQDWLNGKEYKCKVSNKALPAPIEKTISKAKGQPREPQVYTLPPSREEMTKNQVSLTCLVKGFYPSDIAVEWESNGQPENNYKTTPPVLDSDGSFFLYSKLTVDKSRWQQGNVFSCSVMHEALHNHYTQKSLSLSPGKGGGGSGGGGSGGGGSGGGGSGGGGSGGGGSDKTHTCPPCPAPELLGGPSVFLFPPKPKDTLMISRTPEVTCVVVDVSHEDPEVKFNWYVDGVEVHNAKTKPCEEQYGSTYRCVSVLTVLHQDWLNGKEYKCKVSNKALPAPIEKTISKAKGQPREPQVYTLPPSREEMTKNQVSLTCLVKGFYPSDIAVEWESNGQPENNYKTTPPVLDSDGSFFLYSKLTVDKSRWQQGNVFSCSVMHEALHNHYTQKSLSLSPGK

SEQ ID NO: 55 - protein, 5 aa, Artificial Sequence
  Synthetic Polypeptide
  MISC_FEATURE: MU 32-G6 CC x I2C0-scFc VH CDR1
NHAMH

SEQ ID NO: 56 - protein, 17 aa, Artificial Sequence
  Synthetic Polypeptide
  MISC_FEATURE: MU 32-G6 CC x I2C0-scFc VH CDR2
GIWSEGSNKYYAESVKG

SEQ ID NO: 57 - protein, 12 aa, Artificial Sequence
  Synthetic Polypeptide
  MISC_FEATURE: MU 32-G6 CC x I2C0-scFc VH CDR3
ATYTTGWSYFDY

SEQ ID NO: 58 - protein, 11 aa, Artificial Sequence
  Synthetic Polypeptide
  MISC_FEATURE: MU 32-G6 CC x I2C0-scFc VL CDR1
SGDKLGDKYAS

SEQ ID NO: 59 - protein, 7 aa, Artificial Sequence
  Synthetic Polypeptide
  MISC_FEATURE: MU 32-G6 CC x I2C0-scFc VL CDR2
QDRKRPS

SEQ ID NO: 60 - protein, 9 aa, Artificial Sequence
  Synthetic Polypeptide
  MISC_FEATURE: MU 32-G6 CC x I2C0-scFc VL CDR3
QAYDASTWV

SEQ ID NO: 61 - protein, 121 aa, Artificial Sequence
  Synthetic Polypeptide
  MISC_FEATURE: MU 32-G6 CC x I2C0-scFc VH
QVQLVESGGGVVQPGRSLRLSCAASGFTFSNHAMHWVRQAPGKCLEWVAGIWSEGSNKYYAESVKGRFTISRDNSKNTLYLQMNSLRAEDTAVYYCARATYTTGWSYFDYWGQGTLVTVSS

SEQ ID NO: 62 - protein, 106 aa, Artificial Sequence
  Synthetic Polypeptide
  MISC_FEATURE: MU 32-G6 CC x I2C0-scFc VL
SYELTQPPSVSVSPGQTASITCSGDKLGDKYASWYQQKSGQSPVLVIYQDRKRPSGIPERFSGSNSGNTATLTISGTQAMDEADYYCQAYDASTWVFGCGTQLTVL

SEQ ID NO: 63 - protein, 242 aa, Artificial Sequence
  Synthetic Polypeptide
  MISC_FEATURE: MU 32-G6 CC x I2C0-scFc scFv
QVQLVESGGGVVQPGRSLRLSCAASGFTFSNHAMHWVRQAPGKCLEWVAGIWSEGSNKYYAESVKGRFTISRDNSKNTLYLQMNSLRAEDTAVYYCARATYTTGWSYFDYWGQGTLVTVSSGGGGSGGGGSGGGGSSYELTQPPSVSVSPGQTASITCSGDKLGDKYASWYQQKSGQSPVLVIYQDRKRPSGIPERFSGSNSGNTATLTISGTQAMDEADYYCQAYDASTWVFGCGTQLTVL

SEQ ID NO: 64 - protein, 497 aa, Artificial Sequence
  Synthetic Polypeptide
  MISC_FEATURE: MU 32-G6 CC x I2C0-scFc Bispecific molecule
QVQLVESGGGVVQPGRSLRLSCAASGFTFSNHAMHWVRQAPGKCLEWVAGIWSEGSNKYYAESVKGRFTISRDNSKNTLYLQMNSLRAEDTAVYYCARATYTTGWSYFDYWGQGTLVTVSSGGGGSGGGGSGGGGSSYELTQPPSVSVSPGQTASITCSGDKLGDKYASWYQQKSGQSPVLVIYQDRKRPSGIPERFSGSNSGNTATLTISGTQAMDEADYYCQAYDASTWVFGCGTQLTVLSGGGGSEVQLVESGGGLVQPGGSLKLSCAASGFTFNKYAMNWVRQAPGKGLEWVARIRSKYNNYATYYADSVKDRFTISRDDSKNTAYLQMNNLKTEDTAVYYCVRHGNFGNSYISYWAYWGQGTLVTVSSGGGGSGGGGSGGGGSQTVVTQEPSLTVSPGGTVTLTCGSSTGAVTSGNYPNWVQQKPGQAPRGLIGGTKFLAPGTPARFSGSLLGGKAALTLSGVQPEDEAEYYCVLWYSNRWVFGGGTKLTVL

SEQ ID NO: 65 - protein, 985 aa, Artificial Sequence
  Synthetic Polypeptide
  MISC_FEATURE: MU 32-G6 CC x I2C0-scFc Bispecific HLE molecule
QVQLVESGGGVVQPGRSLRLSCAASGFTFSNHAMHWVRQAPGKCLEWVAGIWSEGSNKYYAESVKGRFTISRDNSKNTLYLQMNSLRAEDTAVYYCARATYTTGWSYFDYWGQGTLVTVSSGGGGSGGGGSGGGGSSYELTQPPSVSVSPGQTASITCSGDKLGDKYASWYQQKSGQSPVLVIYQDRKRPSGIPERFSGSNSGNTATLTISGTQAMDEADYYCQAYDASTWVFGCGTQLTVLSGGGGSEVQLVESGGGLVQPGGSLKLSCAASGFTFNKYAMNWVRQAPGKGLEWVARIRSKYNNYATYYADSVKDRFTISRDDSKNTAYLQMNNLKTEDTAVYYCVRHGNFGNSYISYWAYWGQGTLVTVSSGGGGSGGGGSGGGGSQTVVTQEPSLTVSPGGTVTLTCGSSTGAVTSGNYPNWVQQKPGQAPRGLIGGTKFLAPGTPARFSGSLLGGKAALTLSGVQPEDEAEYYCVLWYSNRWVFGGGTKLTVLGGGGDKTHTCPPCPAPELLGGPSVFLFPPKPKDTLMISRTPEVTCVVVDVSHEDPEVKFNWYVDGVEVHNAKTKPCEEQYGSTYRCVSVLTVLHQDWLNGKEYKCKVSNKALPAPIEKTISKAKGQPREPQVYTLPPSREEMTKNQVSLTCLVKGFYPSDIAVEWESNGQPENNYKTTPPVLDSDGSFFLYSKLTVDKSRWQQGNVFSCSVMHEALHNHYTQKSLSLSPGKGGGGSGGGGSGGGGSGGGGSGGGGSGGGGSDKTHTCPPCPAPELLGGPSVFLFPPKPKDTLMISRTPEVTCVVVDVSHEDPEVKFNWYVDGVEVHNAKTKPCEEQYGSTYRCVSVLTVLHQDWLNGKEYKCKVSNKALPAPIEKTISKAKGQPREPQVYTLPPSREEMTKNQVSLTCLVKGFYPSDIAVEWESNGQPENNYKTTPPVLDSDGSFFLYSKLTVDKSRWQQGNVFSCSVMHEALHNHYTQKSLSLSPGK

SEQ ID NO: 66 - protein, 5 aa, Artificial Sequence
  Synthetic Polypeptide
  MISC_FEATURE: MU 9-C2 CC x I2C0-scFc VH CDR1
NFGMH

SEQ ID NO: 67 - protein, 17 aa, Artificial Sequence
  Synthetic Polypeptide
  MISC_FEATURE: MU 9-C2 CC x I2C0-scFc VH CDR2
VIWFDASKTYYASSVKG

SEQ ID NO: 68 - protein, 12 aa, Artificial Sequence
  Synthetic Polypeptide
  MISC_FEATURE: MU 9-C2 CC x I2C0-scFc VH CDR3
ATYSTGWSYFDY

SEQ ID NO: 69 - protein, 11 aa, Artificial Sequence
  Synthetic Polypeptide
  MISC_FEATURE: MU 9-C2 CC x I2C0-scFc VL CDR1
SGDKLGDKYTS

SEQ ID NO: 70 - protein, 7 aa, Artificial Sequence
  Synthetic Polypeptide
  MISC_FEATURE: MU 9-C2 CC x I2C0-scFc VL CDR2
HDAKRPS

SEQ ID NO: 71 - protein, 10 aa, Artificial Sequence
  Synthetic Polypeptide
  MISC_FEATURE: MU 9-C2 CC x I2C0-scFc VL CDR3
QAWDASTAWV

SEQ ID NO: 72 - protein, 121 aa, Artificial Sequence
  Synthetic Polypeptide
  MISC_FEATURE: MU 9-C2 CC x I2C0-scFc VH
QVQLVESGGGVVQPGRSLRLSCAASGFTFSNFGMHWVRQAPGKCLEWVAVIWFDASKTYYASSVKGRFTISRDTSMNTLYLQMNSLRAEDTAVYYCARATYSTGWSYFDYWGQGTLVTVSS

SEQ ID NO: 73 - protein, 107 aa, Artificial Sequence
  Synthetic Polypeptide
  MISC_FEATURE: MU 9-C2 CC x I2C0-scFc VL
SYELTQPPSVSVSPGQTASITCSGDKLGDKYTSWYQQKPGQSPVLVIYHDAKRPSGIPERFSGSNSGNTATLTISGTQAMDEADYYCQAWDASTAWVFGCGTKLTVL

SEQ ID NO: 74 - protein, 243 aa, Artificial Sequence
  Synthetic Polypeptide
  MISC_FEATURE: MU 9-C2 CC x I2C0-scFc scFv
QVQLVESGGGVVQPGRSLRLSCAASGFTFSNFGMHWVRQAPGKCLEWVAVIWFDASKTYYASSVKGRFTISRDTSMNTLYLQMNSLRAEDTAVYYCARATYSTGWSYFDYWGQGTLVTVSSGGGGSGGGGSGGGGSSYELTQPPSVSVSPGQTASITCSGDKLGDKYTSWYQQKPGQSPVLVIYHDAKRPSGIPERFSGSNSGNTATLTISGTQAMDEADYYCQAWDASTAWVFGCGTKLTVL

SEQ ID NO: 75 - protein, 498 aa, Artificial Sequence
  Synthetic Polypeptide
  MISC_FEATURE: MU 9-C2 CC x I2C0-scFc Bispecific molecule
QVQLVESGGGVVQPGRSLRLSCAASGFTFSNFGMHWVRQAPGKCLEWVAVIWFDASKTYYASSVKGRFTISRDTSMNTLYLQMNSLRAEDTAVYYCARATYSTGWSYFDYWGQGTLVTVSSGGGGSGGGGSGGGGSSYELTQPPSVSVSPGQTASITCSGDKLGDKYTSWYQQKPGQSPVLVIYHDAKRPSGIPERFSGSNSGNTATLTISGTQAMDEADYYCQAWDASTAWVFGCGTKLTVLSGGGGSEVQLVESGGGLVQPGGSLKLSCAASGFTFNKYAMNWVRQAPGKGLEWVARIRSKYNNYATYYADSVKDRFTISRDDSKNTAYLQMNNLKTEDTAVYYCVRHGNFGNSYISYWAYWGQGTLVTVSSGGGGSGGGGSGGGGSQTVVTQEPSLTVSPGGTVTLTCGSSTGAVTSGNYPNWVQQKPGQAPRGLIGGTKFLAPGTPARFSGSLLGGKAALTLSGVQPEDEAEYYCVLWYSNRWVFGGGTKLTVL

SEQ ID NO: 76 - protein, 986 aa, Artificial Sequence
  Synthetic Polypeptide
  MISC_FEATURE: MU 9-C2 CC x I2C0-scFc Bispecific HLE molecule
QVQLVESGGGVVQPGRSLRLSCAASGFTFSNFGMHWVRQAPGKCLEWVAVIWFDASKTYYASSVKGRFTISRDTSMNTLYLQMNSLRAEDTAVYYCARATYSTGWSYFDYWGQGTLVTVSSGGGGSGGGGSGGGGSSYELTQPPSVSVSPGQTASITCSGDKLGDKYTSWYQQKPGQSPVLVIYHDAKRPSGIPERFSGSNSGNTATLTISGTQAMDEADYYCQAWDASTAWVFGCGTKLTVLSGGGGSEVQLVESGGGLVQPGGSLKLSCAASGFTFNKYAMNWVRQAPGKGLEWVARIRSKYNNYATYYADSVKDRFTISRDDSKNTAYLQMNNLKTEDTAVYYCVRHGNFGNSYISYWAYWGQGTLVTVSSGGGGSGGGGSGGGGSQTVVTQEPSLTVSPGGTVTLTCGSSTGAVTSGNYPNWVQQKPGQAPRGLIGGTKFLAPGTPARFSGSLLGGKAALTLSGVQPEDEAEYYCVLWYSNRWVFGGGTKLTVLGGGGDKTHTCPPCPAPELLGGPSVFLFPPKPKDTLMISRTPEVTCVVVDVSHEDPEVKFNWYVDGVEVHNAKTKPCEEQYGSTYRCVSVLTVLHQDWLNGKEYKCKVSNKALPAPIEKTISKAKGQPREPQVYTLPPSREEMTKNQVSLTCLVKGFYPSDIAVEWESNGQPENNYKTTPPVLDSDGSFFLYSKLTVDKSRWQQGNVFSCSVMHEALHNHYTQKSLSLSPGKGGGGSGGGGSGGGGSGGGGSGGGGSGGGGSDKTHTCPPCPAPELLGGPSVFLFPPKPKDTLMISRTPEVTCVVVDVSHEDPEVKFNWYVDGVEVHNAKTKPCEEQYGSTYRCVSVLTVLHQDWLNGKEYKCKVSNKALPAPIEKTISKAKGQPREPQVYTLPPSREEMTKNQVSLTCLVKGFYPSDIAVEWESNGQPENNYKTTPPVLDSDGSFFLYSKLTVDKSRWQQGNVFSCSVMHEALHNHYTQKSLSLSPGK

SEQ ID NO: 77 - protein, 5 aa, Artificial Sequence
  Synthetic Polypeptide
  MISC_FEATURE: MU 8-H9 CC x I2C0-scFc VH CDR1
GYYWS

SEQ ID NO: 78 - protein, 16 aa, Artificial Sequence
  Synthetic Polypeptide
  MISC_FEATURE: MU 8-H9 CC x I2C0-scFc VH CDR2
DIEHSGSTKYNPSLKS

SEQ ID NO: 79 - protein, 12 aa, Artificial Sequence
  Synthetic Polypeptide
  MISC_FEATURE: MU 8-H9 CC x I2C0-scFc VH CDR3
KKYSTVWSYFDY

SEQ ID NO: 80 - protein, 11 aa, Artificial Sequence
  Synthetic Polypeptide
  MISC_FEATURE: MU 8-H9 CC x I2C0-scFc VL CDR1
SGDKLGDKYAS

SEQ ID NO: 81 - protein, 7 aa, Artificial Sequence
  Synthetic Polypeptide
  MISC_FEATURE: MU 8-H9 CC x I2C0-scFc VL CDR2
HDNKRPS

SEQ ID NO: 82 - protein, 9 aa, Artificial Sequence
  Synthetic Polypeptide
  MISC_FEATURE: MU 8-H9 CC x I2C0-scFc VL CDR3
QAYGSSSAV

SEQ ID NO: 83 - protein, 120 aa, Artificial Sequence
  Synthetic Polypeptide
  MISC_FEATURE: MU 8-H9 CC x I2C0-scFc VH
QVQLQQWGAGLLKPSETLSLTCAVYGGSFSGYYWSWIRQPPGKCLEWIGDIEHSGSTKYNPSLKSRVTISLDTSKNQFSLKLNSVTAADTAVYFCARKKYSTVWSYFDYWGQGTLVTVSS

SEQ ID NO: 84 - protein, 106 aa, Artificial Sequence
  Synthetic Polypeptide
  MISC_FEATURE: MU 8-H9 CC x I2C0-scFc VL
SYELTQSPSASVSPGQTASITCSGDKLGDKYASWYQQKPGQSPVLVIYHDNKRPSGIPERFSGSNSGNTATLTISGTQAMDEADYYCQAYGSSSAVFGCGTKLTVL

SEQ ID NO: 85 - protein, 241 aa, Artificial Sequence
  Synthetic Polypeptide
  MISC_FEATURE: MU 8-H9 CC x I2C0-scFc scFv
QVQLQQWGAGLLKPSETLSLTCAVYGGSFSGYYWSWIRQPPGKCLEWIGDIEHSGSTKYNPSLKSRVTISLDTSKNQFSLKLNSVTAADTAVYFCARKKYSTVWSYFDYWGQGTLVTVSSGGGGSGGGGSGGGGSSYELTQSPSASVSPGQTASITCSGDKLGDKYASWYQQKPGQSPVLVIYHDNKRPSGIPERFSGSNSGNTATLTISGTQAMDEADYYCQAYGSSSAVFGCGTKLTVL

SEQ ID NO: 86 - protein, 496 aa, Artificial Sequence
  Synthetic Polypeptide
  MISC_FEATURE: MU 8-H9 CC x I2C0-scFc Bispecific molecule
QVQLQQWGAGLLKPSETLSLTCAVYGGSFSGYYWSWIRQPPGKCLEWIGDIEHSGSTKYNPSLKSRVTISLDTSKNQFSLKLNSVTAADTAVYFCARKKYSTVWSYFDYWGQGTLVTVSSGGGGSGGGGSGGGGSSYELTQSPSASVSPGQTASITCSGDKLGDKYASWYQQKPGQSPVLVIYHDNKRPSGIPERFSGSNSGNTATLTISGTQAMDEADYYCQAYGSSSAVFGCGTKLTVLSGGGGSEVQLVESGGGLVQPGGSLKLSCAASGFTFNKYAMNWVRQAPGKGLEWVARIRSKYNNYATYYADSVKDRFTISRDDSKNTAYLQMNNLKTEDTAVYYCVRHGNFGNSYISYWAYWGQGTLVTVSSGGGGSGGGGSGGGGSQTVVTQEPSLTVSPGGTVTLTCGSSTGAVTSGNYPNWVQQKPGQAPRGLIGGTKFLAPGTPARFSGSLLGGKAALTLSGVQPEDEAEYYCVLWYSNRWVFGGGTKLTVL

SEQ ID NO: 87 - protein, 984 aa, Artificial Sequence
  Synthetic Polypeptide
  MISC_FEATURE: MU 8-H9 CC x I2C0-scFc Bispecific HLE molecule
QVQLQQWGAGLLKPSETLSLTCAVYGGSFSGYYWSWIRQPPGKCLEWIGDIEHSGSTKYNPSLKSRVTISLDTSKNQFSLKLNSVTAADTAVYFCARKKYSTVWSYFDYWGQGTLVTVSSGGGGSGGGGSGGGGSSYELTQSPSASVSPGQTASITCSGDKLGDKYASWYQQKPGQSPVLVIYHDNKRPSGIPERFSGSNSGNTATLTISGTQAMDEADYYCQAYGSSSAVFGCGTKLTVLSGGGGSEVQLVESGGGLVQPGGSLKLSCAASGFTFNKYAMNWVRQAPGKGLEWVARIRSKYNNYATYYADSVKDRFTISRDDSKNTAYLQMNNLKTEDTAVYYCVRHGNFGNSYISYWAYWGQGTLVTVSSGGGGSGGGGSGGGGSQTVVTQEPSLTVSPGGTVTLTCGSSTGAVTSGNYPNWVQQKPGQAPRGLIGGTKFLAPGTPARFSGSLLGGKAALTLSGVQPEDEAEYYCVLWYSNRWVFGGGTKLTVLGGGGDKTHTCPPCPAPELLGGPSVFLFPPKPKDTLMISRTPEVTCVVVDVSHEDPEVKFNWYVDGVEVHNAKTKPCEEQYGSTYRCVSVLTVLHQDWLNGKEYKCKVSNKALPAPIEKTISKAKGQPREPQVYTLPPSREEMTKNQVSLTCLVKGFYPSDIAVEWESNGQPENNYKTTPPVLDSDGSFFLYSKLTVDKSRWQQGNVFSCSVMHEALHNHYTQKSLSLSPGKGGGGSGGGGSGGGGSGGGGSGGGGSGGGGSDKTHTCPPCPAPELLGGPSVFLFPPKPKDTLMISRTPEVTCVVVDVSHEDPEVKFNWYVDGVEVHNAKTKPCEEQYGSTYRCVSVLTVLHQDWLNGKEYKCKVSNKALPAPIEKTISKAKGQPREPQVYTLPPSREEMTKNQVSLTCLVKGFYPSDIAVEWESNGQPENNYKTTPPVLDSDGSFFLYSKLTVDKSRWQQGNVFSCSVMHEALHNHYTQKSLSLSPGK

SEQ ID NO: 88 - protein, 5 aa, Artificial Sequence
  Synthetic Polypeptide
  MISC_FEATURE: MU 8-H8 CC x I2C0-scFc VH CDR1
GYYWS

SEQ ID NO: 89 - protein, 16 aa, Artificial Sequence
  Synthetic Polypeptide
  MISC_FEATURE: MU 8-H8 CC x I2C0-scFc VH CDR2
DIDASGSTKYNPSLKS

SEQ ID NO: 90 - protein, 12 aa, Artificial Sequence
  Synthetic Polypeptide
  MISC_FEATURE: MU 8-H8 CC x I2C0-scFc VH CDR3
KKYSTVWSYFDY

SEQ ID NO: 91 - protein, 11 aa, Artificial Sequence
  Synthetic Polypeptide
  MISC_FEATURE: MU 8-H8 CC x I2C0-scFc VL CDR1
SGDKLGDKYAS

SEQ ID NO: 92 - protein, 7 aa, Artificial Sequence
  Synthetic Polypeptide
  MISC_FEATURE: MU 8-H8 CC x I2C0-scFc VL CDR2
QDRKRPS

SEQ ID NO: 93 - protein, 9 aa, Artificial Sequence
  Synthetic Polypeptide
  MISC_FEATURE: MU 8-H8 CC x I2C0-scFc VL CDR3
QAWGSSTAV

SEQ ID NO: 94 - protein, 120 aa, Artificial Sequence
  Synthetic Polypeptide
  MISC_FEATURE: MU 8-H8 CC x I2C0-scFc VH
QVQLQQWGAGLLKPSETLSLTCAVYGGSFSGYYWSWIRQPPGKCLEWIGDIDASGSTKYNPSLKSRVTISLDTSKNQFSLKLNSVTAADTAVYFCARKKYSTVWSYFDYWGQGTLVTVSS

SEQ ID NO: 95 - protein, 106 aa, Artificial Sequence
  Synthetic Polypeptide
  MISC_FEATURE: MU 8-H8 CC x I2C0-scFc VL
SYELTQPPSVSVPPGQTASITCSGDKLGDKYASWYQQKPGQSPVLIIYQDRKRPSGVPERFSGSNSGNTATLTISGTQAMDEADYYCQAWGSSTAVFGCGTKLTVL

SEQ ID NO: 96 - protein, 241 aa, Artificial Sequence
  Synthetic Polypeptide
  MISC_FEATURE: MU 8-H8 CC x I2C0-scFc scFv
QVQLQQWGAGLLKPSETLSLTCAVYGGSFSGYYWSWIRQPPGKCLEWIGDIDASGSTKYNPSLKSRVTISLDTSKNQFSLKLNSVTAADTAVYFCARKKYSTVWSYFDYWGQGTLVTVSSGGGGSGGGGSGGGGSSYELTQPPSVSVPPGQTASITCSGDKLGDKYASWYQQKPGQSPVLIIYQDRKRPSGVPERFSGSNSGNTATLTISGTQAMDEADYYCQAWGSSTAVFGCGTKLTVL

SEQ ID NO: 97 - protein, 496 aa, Artificial Sequence
  Synthetic Polypeptide
  MISC_FEATURE: MU 8-H8 CC x I2C0-scFc Bispecific molecule
QVQLQQWGAGLLKPSETLSLTCAVYGGSFSGYYWSWIRQPPGKCLEWIGDIDASGSTKYNPSLKSRVTISLDTSKNQFSLKLNSVTAADTAVYFCARKKYSTVWSYFDYWGQGTLVTVSSGGGGSGGGGSGGGGSSYELTQPPSVSVPPGQTASITCSGDKLGDKYASWYQQKPGQSPVLIIYQDRKRPSGVPERFSGSNSGNTATLTISGTQAMDEADYYCQAWGSSTAVFGCGTKLTVLSGGGGSEVQLVESGGGLVQPGGSLKLSCAASGFTFNKYAMNWVRQAPGKGLEWVARIRSKYNNYATYYADSVKDRFTISRDDSKNTAYLQMNNLKTEDTAVYYCVRHGNFGNSYISYWAYWGQGTLVTVSSGGGGSGGGGSGGGGSQTVVTQEPSLTVSPGGTVTLTCGSSTGAVTSGNYPNWVQQKPGQAPRGLIGGTKFLAPGTPARFSGSLLGGKAALTLSGVQPEDEAEYYCVLWYSNRWVFGGGTKLTVL

SEQ ID NO: 98 - protein, 984 aa, Artificial Sequence
  Synthetic Polypeptide
  MISC_FEATURE: MU 8-H8 CC x I2C0-scFc Bispecific HLE molecule
QVQLQQWGAGLLKPSETLSLTCAVYGGSFSGYYWSWIRQPPGKCLEWIGDIDASGSTKYNPSLKSRVTISLDTSKNQFSLKLNSVTAADTAVYFCARKKYSTVWSYFDYWGQGTLVTVSSGGGGSGGGGSGGGGSSYELTQPPSVSVPPGQTASITCSGDKLGDKYASWYQQKPGQSPVLIIYQDRKRPSGVPERFSGSNSGNTATLTISGTQAMDEADYYCQAWGSSTAVFGCGTKLTVLSGGGGSEVQLVESGGGLVQPGGSLKLSCAASGFTFNKYAMNWVRQAPGKGLEWVARIRSKYNNYATYYADSVKDRFTISRDDSKNTAYLQMNNLKTEDTAVYYCVRHGNFGNSYISYWAYWGQGTLVTVSSGGGGSGGGGSGGGGSQTVVTQEPSLTVSPGGTVTLTCGSSTGAVTSGNYPNWVQQKPGQAPRGLIGGTKFLAPGTPARFSGSLLGGKAALTLSGVQPEDEAEYYCVLWYSNRWVFGGGTKLTVLGGGGDKTHTCPPCPAPELLGGPSVFLFPPKPKDTLMISRTPEVTCVVVDVSHEDPEVKFNWYVDGVEVHNAKTKPCEEQYGSTYRCVSVLTVLHQDWLNGKEYKCKVSNKALPAPIEKTISKAKGQPREPQVYTLPPSREEMTKNQVSLTCLVKGFYPSDIAVEWESNGQPENNYKTTPPVLDSDGSFFLYSKLTVDKSRWQQGNVFSCSVMHEALHNHYTQKSLSLSPGKGGGGSGGGGSGGGGSGGGGSGGGGSGGGGSDKTHTCPPCPAPELLGGPSVFLFPPKPKDTLMISRTPEVTCVVVDVSHEDPEVKFNWYVDGVEVHNAKTKPCEEQYGSTYRCVSVLTVLHQDWLNGKEYKCKVSNKALPAPIEKTISKAKGQPREPQVYTLPPSREEMTKNQVSLTCLVKGFYPSDIAVEWESNGQPENNYKTTPPVLDSDGSFFLYSKLTVDKSRWQQGNVFSCSVMHEALHNHYTQKSLSLSPGK

SEQ ID NO: 99 - protein, 5 aa, Artificial Sequence
  Synthetic Polypeptide
  MISC_FEATURE: MU 8-H5 CC x I2C0-scFc VH CDR1
SFGMH

SEQ ID NO: 100 - protein, 17 aa, Artificial Sequence
  Synthetic Polypeptide
  MISC_FEATURE: MU 8-H5 CC x I2C0-scFc VH CDR2
VIWFDASNKYYAESVKG

SEQ ID NO: 101 - protein, 9 aa, Artificial Sequence
  Synthetic Polypeptide
  MISC_FEATURE: MU 8-H5 CC x I2C0-scFc VH CDR3
GGYTYGFDY

SEQ ID NO: 102 - protein, 11 aa, Artificial Sequence
  Synthetic Polypeptide
  MISC_FEATURE: MU 8-H5 CC x I2C0-scFc VL CDR1
RASQAVNRYLA

SEQ ID NO: 103 - protein, 7 aa, Artificial Sequence
  Synthetic Polypeptide
  MISC_FEATURE: MU 8-H5 CC x I2C0-scFc VL CDR2
GASSRAT

SEQ ID NO: 104 - protein, 9 aa, Artificial Sequence
  Synthetic Polypeptide
  MISC_FEATURE: MU 8-H5 CC x I2C0-scFc VL CDR3
QQYGSSIFT

SEQ ID NO: 105 - protein, 118 aa, Artificial Sequence
  Synthetic Polypeptide
  MISC_FEATURE: MU 8-H5 CC x I2C0-scFc VH
QVQLVESGGGVVQPGRSLRLSCAASGFTFSSFGMHWVRQAPGKCLEWVAVIWFDASNKYYAESVKGRFTISRDNSKNTLYLQMNSLRAEDTAVYYCARGGYTYGFDYWGQGTLVTVSS

SEQ ID NO: 106 - protein, 107 aa, Artificial Sequence
  Synthetic Polypeptide
  MISC_FEATURE: MU 8-H5 CC x I2C0-scFc VL
EIVLTQSPGTLSLSPGERATLSCRASQAVNRYLAWYQQKPGQAPRLLIYGASSRATGIPDRFSGSGSGTDFTLTISRLEPEDFAVYYCQQYGSSIFTFGCGTKVEIK

SEQ ID NO: 107 - protein, 240 aa, Artificial Sequence
  Synthetic Polypeptide
  MISC_FEATURE: MU 8-H5 CC x I2C0-scFc scFv
QVQLVESGGGVVQPGRSLRLSCAASGFTFSSFGMHWVRQAPGKCLEWVAVIWFDASNKYYAESVKGRFTISRDNSKNTLYLQMNSLRAEDTAVYYCARGGYTYGFDYWGQGTLVTVSSGGGGSGGGGSGGGGSEIVLTQSPGTLSLSPGERATLSCRASQAVNRYLAWYQQKPGQAPRLLIYGASSRATGIPDRFSGSGSGTDFTLTISRLEPEDFAVYYCQQYGSSIFTFGCGTKVEIK

SEQ ID NO: 108 - protein, 495 aa, Artificial Sequence
  Synthetic Polypeptide
  MISC_FEATURE: MU 8-H5 CC x I2C0-scFc Bispecific molecule
QVQLVESGGGVVQPGRSLRLSCAASGFTFSSFGMHWVRQAPGKCLEWVAVIWFDASNKYYAESVKGRFTISRDNSKNTLYLQMNSLRAEDTAVYYCARGGYTYGFDYWGQGTLVTVSSGGGGSGGGGSGGGGSEIVLTQSPGTLSLSPGERATLSCRASQAVNRYLAWYQQKPGQAPRLLIYGASSRATGIPDRFSGSGSGTDFTLTISRLEPEDFAVYYCQQYGSSIFTFGCGTKVEIKSGGGGSEVQLVESGGGLVQPGGSLKLSCAASGFTFNKYAMNWVRQAPGKGLEWVARIRSKYNNYATYYADSVKDRFTISRDDSKNTAYLQMNNLKTEDTAVYYCVRHGNFGNSYISYWAYWGQGTLVTVSSGGGGSGGGGSGGGGSQTVVTQEPSLTVSPGGTVTLTCGSSTGAVTSGNYPNWVQQKPGQAPRGLIGGTKFLAPGTPARFSGSLLGGKAALTLSGVQPEDEAEYYCVLWYSNRWVFGGGTKLTVL

SEQ ID NO: 109 - protein, 983 aa, Artificial Sequence
  Synthetic Polypeptide
  MISC_FEATURE: MU 8-H5 CC x I2C0-scFc Bispecific HLE molecule
QVQLVESGGGVVQPGRSLRLSCAASGFTFSSFGMHWVRQAPGKCLEWVAVIWFDASNKYYAESVKGRFTISRDNSKNTLYLQMNSLRAEDTAVYYCARGGYTYGFDYWGQGTLVTVSSGGGGSGGGGSGGGGSEIVLTQSPGTLSLSPGERATLSCRASQAVNRYLAWYQQKPGQAPRLLIYGASSRATGIPDRFSGSGSGTDFTLTISRLEPEDFAVYYCQQYGSSIFTFGCGTKVEIKSGGGGSEVQLVESGGGLVQPGGSLKLSCAASGFTFNKYAMNWVRQAPGKGLEWVARIRSKYNNYATYYADSVKDRFTISRDDSKNTAYLQMNNLKTEDTAVYYCVRHGNFGNSYISYWAYWGQGTLVTVSSGGGGSGGGGSGGGGSQTVVTQEPSLTVSPGGTVTLTCGSSTGAVTSGNYPNWVQQKPGQAPRGLIGGTKFLAPGTPARFSGSLLGGKAALTLSGVQPEDEAEYYCVLWYSNRWVFGGGTKLTVLGGGGDKTHTCPPCPAPELLGGPSVFLFPPKPKDTLMISRTPEVTCVVVDVSHEDPEVKFNWYVDGVEVHNAKTKPCEEQYGSTYRCVSVLTVLHQDWLNGKEYKCKVSNKALPAPIEKTISKAKGQPREPQVYTLPPSREEMTKNQVSLTCLVKGFYPSDIAVEWESNGQPENNYKTTPPVLDSDGSFFLYSKLTVDKSRWQQGNVFSCSVMHEALHNHYTQKSLSLSPGKGGGGSGGGGSGGGGSGGGGSGGGGSGGGGSDKTHTCPPCPAPELLGGPSVFLFPPKPKDTLMISRTPEVTCVVVDVSHEDPEVKFNWYVDGVEVHNAKTKPCEEQYGSTYRCVSVLTVLHQDWLNGKEYKCKVSNKALPAPIEKTISKAKGQPREPQVYTLPPSREEMTKNQVSLTCLVKGFYPSDIAVEWESNGQPENNYKTTPPVLDSDGSFFLYSKLTVDKSRWQQGNVFSCSVMHEALHNHYTQKSLSLSPGK

SEQ ID NO: 110 - protein, 5 aa, Artificial Sequence
  Synthetic Polypeptide
  MISC_FEATURE: MU 8-F11 CC x I2C0-scFc VH CDR1
SHYWS

SEQ ID NO: 111 - protein, 16 aa, Artificial Sequence
  Synthetic Polypeptide
  MISC_FEATURE: MU 8-F11 CC x I2C0-scFc VH CDR2
RIDVSGSANYNPALKS

SEQ ID NO: 112 - protein, 12 aa, Artificial Sequence
  Synthetic Polypeptide
  MISC_FEATURE: MU 8-F11 CC x I2C0-scFc VH CDR3
APYSSGWGYFDY

SEQ ID NO: 113 - protein, 11 aa, Artificial Sequence
  Synthetic Polypeptide
  MISC_FEATURE: MU 8-F11 CC x I2C0-scFc VL CDR1
SGDKLGDKYAS

SEQ ID NO: 114 - protein, 7 aa, Artificial Sequence
  Synthetic Polypeptide
  MISC_FEATURE: MU 8-F11 CC x I2C0-scFc VL CDR2
HDNKRPS

SEQ ID NO: 115 - protein, 9 aa, Artificial Sequence
  Synthetic Polypeptide
  MISC_FEATURE: MU 8-F11 CC x I2C0-scFc VL CDR3
QAWDITTAV

SEQ ID NO: 116 - protein, 120 aa, Artificial Sequence
  Synthetic Polypeptide
  MISC_FEATURE: MU 8-F11 CC x I2C0-scFc VH
QVQLQESGPGLVKPSETLSLTCTVSGGSISSHYWSWIRQSAGKCLEWIGRIDVSGSANYNPALKSRATMSADTSKNQFSLRLSSVTAADTAVYYCARAPYSSGWGYFDYWGQGTLVTVSS

SEQ ID NO: 117 - protein, 106 aa, Artificial Sequence
  Synthetic Polypeptide
  MISC_FEATURE: MU 8-F11 CC x I2C0-scFc VL
SYELTQPPSVSVSPGQTASITCSGDKLGDKYASWYQQQPGQSPVLVIYHDNKRPSGIPERFSGSNSGNTATLTISGTQAMDEADYFCQAWDITTAVFGCGTKLTVL

SEQ ID NO: 118 - protein, 241 aa, Artificial Sequence
  Synthetic Polypeptide
  MISC_FEATURE: MU 8-F11 CC x I2C0-scFc scFv
QVQLQESGPGLVKPSETLSLTCTVSGGSISSHYWSWIRQSAGKCLEWIGRIDVSGSANYNPALKSRATMSADTSKNQFSLRLSSVTAADTAVYYCARAPYSSGWGYFDYWGQGTLVTVSSGGGGSGGGGSGGGGSSYELTQPPSVSVSPGQTASITCSGDKLGDKYASWYQQQPGQSPVLVIYHDNKRPSGIPERFSGSNSGNTATLTISGTQAMDEADYFCQAWDITTAVFGCGTKLTVL

SEQ ID NO: 119 - protein, 496 aa, Artificial Sequence
  Synthetic Polypeptide
  MISC_FEATURE: MU 8-F11 CC x I2C0-scFc Bispecific molecule
QVQLQESGPGLVKPSETLSLTCTVSGGSISSHYWSWIRQSAGKCLEWIGRIDVSGSANYNPALKSRATMSADTSKNQFSLRLSSVTAADTAVYYCARAPYSSGWGYFDYWGQGTLVTVSSGGGGSGGGGSGGGGSSYELTQPPSVSVSPGQTASITCSGDKLGDKYASWYQQQPGQSPVLVIYHDNKRPSGIPERFSGSNSGNTATLTISGTQAMDEADYFCQAWDITTAVFGCGTKLTVLSGGGGSEVQLVESGGGLVQPGGSLKLSCAASGFTFNKYAMNWVRQAPGKGLEWVARIRSKYNNYATYYADSVKDRFTISRDDSKNTAYLQMNNLKTEDTAVYYCVRHGNFGNSYISYWAYWGQGTLVTVSSGGGGSGGGGSGGGGSQTVVTQEPSLTVSPGGTVTLTCGSSTGAVTSGNYPNWVQQKPGQAPRGLIGGTKFLAPGTPARFSGSLLGGKAALTLSGVQPEDEAEYYCVLWYSNRWVFGGGTKLTVL

SEQ ID NO: 120 - protein, 984 aa, Artificial Sequence
  Synthetic Polypeptide
  MISC_FEATURE: MU 8-F11 CC x I2C0-scFc Bispecific HLE molecule
QVQLQESGPGLVKPSETLSLTCTVSGGSISSHYWSWIRQSAGKCLEWIGRIDVSGSANYNPALKSRATMSADTSKNQFSLRLSSVTAADTAVYYCARAPYSSGWGYFDYWGQGTLVTVSSGGGGSGGGGSGGGGSSYELTQPPSVSVSPGQTASITCSGDKLGDKYASWYQQQPGQSPVLVIYHDNKRPSGIPERFSGSNSGNTATLTISGTQAMDEADYFCQAWDITTAVFGCGTKLTVLSGGGGSEVQLVESGGGLVQPGGSLKLSCAASGFTFNKYAMNWVRQAPGKGLEWVARIRSKYNNYATYYADSVKDRFTISRDDSKNTAYLQMNNLKTEDTAVYYCVRHGNFGNSYISYWAYWGQGTLVTVSSGGGGSGGGGSGGGGSQTVVTQEPSLTVSPGGTVTLTCGSSTGAVTSGNYPNWVQQKPGQAPRGLIGGTKFLAPGTPARFSGSLLGGKAALTLSGVQPEDEAEYYCVLWYSNRWVFGGGTKLTVLGGGGDKTHTCPPCPAPELLGGPSVFLFPPKPKDTLMISRTPEVTCVVVDVSHEDPEVKFNWYVDGVEVHNAKTKPCEEQYGSTYRCVSVLTVLHQDWLNGKEYKCKVSNKALPAPIEKTISKAKGQPREPQVYTLPPSREEMTKNQVSLTCLVKGFYPSDIAVEWESNGQPENNYKTTPPVLDSDGSFFLYSKLTVDKSRWQQGNVFSCSVMHEALHNHYTQKSLSLSPGKGGGGSGGGGSGGGGSGGGGSGGGGSGGGGSDKTHTCPPCPAPELLGGPSVFLFPPKPKDTLMISRTPEVTCVVVDVSHEDPEVKFNWYVDGVEVHNAKTKPCEEQYGSTYRCVSVLTVLHQDWLNGKEYKCKVSNKALPAPIEKTISKAKGQPREPQVYTLPPSREEMTKNQVSLTCLVKGFYPSDIAVEWESNGQPENNYKTTPPVLDSDGSFFLYSKLTVDKSRWQQGNVFSCSVMHEALHNHYTQKSLSLSPGK

SEQ ID NO: 121 - protein, 5 aa, Artificial Sequence
  Synthetic Polypeptide
  MISC_FEATURE: MU 8-F9 CC x I2C0-scFc VH CDR1
GYYWS

SEQ ID NO: 122 - protein, 16 aa, Artificial Sequence
  Synthetic Polypeptide
  MISC_FEATURE: MU 8-F9 CC x I2C0-scFc VH CDR2
DIDASGSTKYNPSLKS

SEQ ID NO: 123 - protein, 12 aa, Artificial Sequence
  Synthetic Polypeptide
  MISC_FEATURE: MU 8-F9 CC x I2C0-scFc VH CDR3
KKYSTVWSYFDY

SEQ ID NO: 124 - protein, 11 aa, Artificial Sequence
  Synthetic Polypeptide
  MISC_FEATURE: MU 8-F9 CC x I2C0-scFc VL CDR1
SGDKLGDKYAS

SEQ ID NO: 125 - protein, 7 aa, Artificial Sequence
  Synthetic Polypeptide
  MISC_FEATURE: MU 8-F9 CC x I2C0-scFc VL CDR2
QDRKRPS

SEQ ID NO: 126 - protein, 9 aa, Artificial Sequence
  Synthetic Polypeptide
  MISC_FEATURE: MU 8-F9 CC x I2C0-scFc VL CDR3
QAWGSSAAV

SEQ ID NO: 127 - protein, 120 aa, Artificial Sequence; identical to SEQ ID NO: 94
  Synthetic Polypeptide
  MISC_FEATURE: MU 8-F9 CC x I2C0-scFc VH

SEQ ID NO: 128 - protein, 106 aa, Artificial Sequence
  Synthetic Polypeptide
  MISC_FEATURE: MU 8-F9 CC x I2C0-scFc VL
SYELTQPSSVSVSPGQTASITCSGDKLGDKYASWYQQKPGQSPVLVIYQDRKRPSGVPERFSGSNSGNTATLTISGTQAMDEADYYCQAWGSSAAVFGCGTKLTVL

SEQ ID NO: 129 - protein, 241 aa, Artificial Sequence
  Synthetic Polypeptide
  MISC_FEATURE: MU 8-F9 CC x I2C0-scFc scFv
QVQLQQWGAGLLKPSETLSLTCAVYGGSFSGYYWSWIRQPPGKCLEWIGDIDASGSTKYNPSLKSRVTISLDTSKNQFSLKLNSVTAADTAVYFCARKKYSTVWSYFDYWGQGTLVTVSSGGGGSGGGGSGGGGSSYELTQPSSVSVSPGQTASITCSGDKLGDKYASWYQQKPGQSPVLVIYQDRKRPSGVPERFSGSNSGNTATLTISGTQAMDEADYYCQAWGSSAAVFGCGTKLTVL

SEQ ID NO: 130 - protein, 496 aa, Artificial Sequence
  Synthetic Polypeptide
  MISC_FEATURE: MU 8-F9 CC x I2C0-scFc Bispecific molecule
QVQLQQWGAGLLKPSETLSLTCAVYGGSFSGYYWSWIRQPPGKCLEWIGDIDASGSTKYNPSLKSRVTISLDTSKNQFSLKLNSVTAADTAVYFCARKKYSTVWSYFDYWGQGTLVTVSSGGGGSGGGGSGGGGSSYELTQPSSVSVSPGQTASITCSGDKLGDKYASWYQQKPGQSPVLVIYQDRKRPSGVPERFSGSNSGNTATLTISGTQAMDEADYYCQAWGSSAAVFGCGTKLTVLSGGGGSEVQLVESGGGLVQPGGSLKLSCAASGFTFNKYAMNWVRQAPGKGLEWVARIRSKYNNYATYYADSVKDRFTISRDDSKNTAYLQMNNLKTEDTAVYYCVRHGNFGNSYISYWAYWGQGTLVTVSSGGGGSGGGGSGGGGSQTVVTQEPSLTVSPGGTVTLTCGSSTGAVTSGNYPNWVQQKPGQAPRGLIGGTKFLAPGTPARFSGSLLGGKAALTLSGVQPEDEAEYYCVLWYSNRWVFGGGTKLTVL

SEQ ID NO: 131 - protein, 984 aa, Artificial Sequence
  Synthetic Polypeptide
  MISC_FEATURE: MU 8-F9 CC x I2C0-scFc Bispecific HLE molecule
QVQLQQWGAGLLKPSETLSLTCAVYGGSFSGYYWSWIRQPPGKCLEWIGDIDASGSTKYNPSLKSRVTISLDTSKNQFSLKLNSVTAADTAVYFCARKKYSTVWSYFDYWGQGTLVTVSSGGGGSGGGGSGGGGSSYELTQPSSVSVSPGQTASITCSGDKLGDKYASWYQQKPGQSPVLVIYQDRKRPSGVPERFSGSNSGNTATLTISGTQAMDEADYYCQAWGSSAAVFGCGTKLTVLSGGGGSEVQLVESGGGLVQPGGSLKLSCAASGFTFNKYAMNWVRQAPGKGLEWVARIRSKYNNYATYYADSVKDRFTISRDDSKNTAYLQMNNLKTEDTAVYYCVRHGNFGNSYISYWAYWGQGTLVTVSSGGGGSGGGGSGGGGSQTVVTQEPSLTVSPGGTVTLTCGSSTGAVTSGNYPNWVQQKPGQAPRGLIGGTKFLAPGTPARFSGSLLGGKAALTLSGVQPEDEAEYYCVLWYSNRWVFGGGTKLTVLGGGGDKTHTCPPCPAPELLGGPSVFLFPPKPKDTLMISRTPEVTCVVVDVSHEDPEVKFNWYVDGVEVHNAKTKPCEEQYGSTYRCVSVLTVLHQDWLNGKEYKCKVSNKALPAPIEKTISKAKGQPREPQVYTLPPSREEMTKNQVSLTCLVKGFYPSDIAVEWESNGQPENNYKTTPPVLDSDGSFFLYSKLTVDKSRWQQGNVFSCSVMHEALHNHYTQKSLSLSPGKGGGGSGGGGSGGGGSGGGGSGGGGSGGGGSDKTHTCPPCPAPELLGGPSVFLFPPKPKDTLMISRTPEVTCVVVDVSHEDPEVKFNWYVDGVEVHNAKTKPCEEQYGSTYRCVSVLTVLHQDWLNGKEYKCKVSNKALPAPIEKTISKAKGQPREPQVYTLPPSREEMTKNQVSLTCLVKGFYPSDIAVEWESNGQPENNYKTTPPVLDSDGSFFLYSKLTVDKSRWQQGNVFSCSVMHEALHNHYTQKSLSLSPGK

SEQ ID NO: 132 - protein, 5 aa, Artificial Sequence
  Synthetic Polypeptide
  MISC_FEATURE: MU 8-E3 CC X I2C0-scFc VH CDR1
NHGMH

SEQ ID NO: 133 - protein, 17 aa, Artificial Sequence
  Synthetic Polypeptide
  MISC_FEATURE: MU 8-E3 CC X I2C0-scFc VH CDR2
GIWSDASNKYYADAVKG

SEQ ID NO: 134 - protein, 12 aa, Artificial Sequence
  Synthetic Polypeptide
  MISC_FEATURE: MU 8-E3 CC X I2C0-scFc VH CDR3
ATYTTGWSYFDY

SEQ ID NO: 135 - protein, 11 aa, Artificial Sequence
  Synthetic Polypeptide
  MISC_FEATURE: MU 8-E3 CC X I2C0-scFc VL CDR1
SGDKLGDKYAS

SEQ ID NO: 136 - protein, 7 aa, Artificial Sequence
  Synthetic Polypeptide
  MISC_FEATURE: MU 8-E3 CC X I2C0-scFc VL CDR2
QDNKRPS

SEQ ID NO: 137 - protein, 9 aa, Artificial Sequence
  Synthetic Polypeptide
  MISC_FEATURE: MU 8-E3 CC X I2C0-scFc VL CDR3
QAYDASTWV

SEQ ID NO: 138 - protein, 121 aa, Artificial Sequence
  Synthetic Polypeptide
  MISC_FEATURE: MU 8-E3 CC X I2C0-scFc VH
QVQLVESGGGVVQPGRSLRLACAASGFTFSNHGMHWVRQAPGKCLEWVAGIWSDASNKYYADAVKGRFTISRDNSKNTLYLQMNSLRAEDTAVYYCARATYTTGWSYFDYWGQGTLVTVSS

SEQ ID NO: 139 - protein, 106 aa, Artificial Sequence
  Synthetic Polypeptide
  MISC_FEATURE: MU 8-E3 CC X I2C0-scFc VL
SYELTQPASVSVSPGQTASITCSGDKLGDKYASWYQQKSGQSPVLVIYQDNKRPSGIPERFSGSNSGNTATLTISGTQAMDEADYYCQAYDASTWVFGCGTQLTVL

SEQ ID NO: 140 - protein, 242 aa, Artificial Sequence
  Synthetic Polypeptide
  MISC_FEATURE: MU 8-E3 CC X I2C0-scFc scFv
QVQLVESGGGVVQPGRSLRLACAASGFTFSNHGMHWVRQAPGKCLEWVAGIWSDASNKYYADAVKGRFTISRDNSKNTLYLQMNSLRAEDTAVYYCARATYTTGWSYFDYWGQGTLVTVSSGGGGSGGGGSGGGGSSYELTQPASVSVSPGQTASITCSGDKLGDKYASWYQQKSGQSPVLVIYQDNKRPSGIPERFSGSNSGNTATLTISGTQAMDEADYYCQAYDASTWVFGCGTQLTVL

SEQ ID NO: 141 - protein, 497 aa, Artificial Sequence
  Synthetic Polypeptide
  MISC_FEATURE: MU 8-E3 CC X I2C0-scFc Bispecific molecule
QVQLVESGGGVVQPGRSLRLACAASGFTFSNHGMHWVRQAPGKCLEWVAGIWSDASNKYYADAVKGRFTISRDNSKNTLYLQMNSLRAEDTAVYYCARATYTTGWSYFDYWGQGTLVTVSSGGGGSGGGGSGGGGSSYELTQPASVSVSPGQTASITCSGDKLGDKYASWYQQKSGQSPVLVIYQDNKRPSGIPERFSGSNSGNTATLTISGTQAMDEADYYCQAYDASTWVFGCGTQLTVLSGGGGSEVQLVESGGGLVQPGGSLKLSCAASGFTFNKYAMNWVRQAPGKGLEWVARIRSKYNNYATYYADSVKDRFTISRDDSKNTAYLQMNNLKTEDTAVYYCVRHGNFGNSYISYWAYWGQGTLVTVSSGGGGSGGGGSGGGGSQTVVTQEPSLTVSPGGTVTLTCGSSTGAVTSGNYPNWVQQKPGQAPRGLIGGTKFLAPGTPARFSGSLLGGKAALTLSGVQPEDEAEYYCVLWYSNRWVFGGGTKLTVL

SEQ ID NO: 142 - protein, 985 aa, Artificial Sequence
  Synthetic Polypeptide
  MISC_FEATURE: MU 8-E3 CC X I2C0-scFc Bispecific HLE molecule
QVQLVESGGGVVQPGRSLRLACAASGFTFSNHGMHWVRQAPGKCLEWVAGIWSDASNKYYADAVKGRFTISRDNSKNTLYLQMNSLRAEDTAVYYCARATYTTGWSYFDYWGQGTLVTVSSGGGGSGGGGSGGGGSSYELTQPASVSVSPGQTASITCSGDKLGDKYASWYQQKSGQSPVLVIYQDNKRPSGIPERFSGSNSGNTATLTISGTQAMDEADYYCQAYDASTWVFGCGTQLTVLSGGGGSEVQLVESGGGLVQPGGSLKLSCAASGFTFNKYAMNWVRQAPGKGLEWVARIRSKYNNYATYYADSVKDRFTISRDDSKNTAYLQMNNLKTEDTAVYYCVRHGNFGNSYISYWAYWGQGTLVTVSSGGGGSGGGGSGGGGSQTVVTQEPSLTVSPGGTVTLTCGSSTGAVTSGNYPNWVQQKPGQAPRGLIGGTKFLAPGTPARFSGSLLGGKAALTLSGVQPEDEAEYYCVLWYSNRWVFGGGTKLTVLGGGGDKTHTCPPCPAPELLGGPSVFLFPPKPKDTLMISRTPEVTCVVVDVSHEDPEVKFNWYVDGVEVHNAKTKPCEEQYGSTYRCVSVLTVLHQDWLNGKEYKCKVSNKALPAPIEKTISKAKGQPREPQVYTLPPSREEMTKNQVSLTCLVKGFYPSDIAVEWESNGQPENNYKTTPPVLDSDGSFFLYSKLTVDKSRWQQGNVFSCSVMHEALHNHYTQKSLSLSPGKGGGGSGGGGSGGGGSGGGGSGGGGSGGGGSDKTHTCPPCPAPELLGGPSVFLFPPKPKDTLMISRTPEVTCVVVDVSHEDPEVKFNWYVDGVEVHNAKTKPCEEQYGSTYRCVSVLTVLHQDWLNGKEYKCKVSNKALPAPIEKTISKAKGQPREPQVYTLPPSREEMTKNQVSLTCLVKGFYPSDIAVEWESNGQPENNYKTTPPVLDSDGSFFLYSKLTVDKSRWQQGNVFSCSVMHEALHNHYTQKSLSLSPGK

SEQ ID NO: 143 - protein, 5 aa, Artificial Sequence
  Synthetic Polypeptide
  MISC_FEATURE: MU 8-D7 CC x I2C0-scFc VH CDR1
GYYWS

SEQ ID NO: 144 - protein, 16 aa, Artificial Sequence
  Synthetic Polypeptide
  MISC_FEATURE: MU 8-D7 CC x I2C0-scFc VH CDR2
DIDASGSTKYNPSLKS

SEQ ID NO: 145 - protein, 12 aa, Artificial Sequence
  Synthetic Polypeptide
  MISC_FEATURE: MU 8-D7 CC x I2C0-scFc VH CDR3
KKYSTVWSYFDY

SEQ ID NO: 146 - protein, 11 aa, Artificial Sequence
  Synthetic Polypeptide
  MISC_FEATURE: MU 8-D7 CC x I2C0-scFc VL CDR1
SGDKLGEKYAS

SEQ ID NO: 147 - protein, 7 aa, Artificial Sequence
  Synthetic Polypeptide
  MISC_FEATURE: MU 8-D7 CC x I2C0-scFc VL CDR2
QDRKRPS

SEQ ID NO: 148 - protein, 9 aa, Artificial Sequence
  Synthetic Polypeptide
  MISC_FEATURE: MU 8-D7 CC x I2C0-scFc VL CDR3
QAWGSSAAV

SEQ ID NO: 149 - protein, 120 aa, Artificial Sequence
  Synthetic Polypeptide
  MISC_FEATURE: MU 8-D7 CC x I2C0-scFc VH
QVQLQQWGAGLLKPSETLSLTCAVYGGSFSGYYWSWIRQPPGKCLEWIGDIDASGSTKYNPSLKSRVTISLDTSKNQFSLKLNSVTAADTAVYFCARKKYSTVWSYFDYWRQGTLVTVSS

SEQ ID NO: 150 - protein, 106 aa, Artificial Sequence
  Synthetic Polypeptide
  MISC_FEATURE: MU 8-D7 CC x I2C0-scFc VL
SYELTQPSSVSVPPGQTASITCSGDKLGEKYASWYQQKPGQSPVLIIYQDRKRPSGVPERFSGSNSGNTATLTISGTQAMDEADYYCQAWGSSAAVFGCGTKLTVL

SEQ ID NO: 151 - protein, 242 aa, Artificial Sequence
  Synthetic Polypeptide
  MISC_FEATURE: MU 8-D7 CC x I2C0-scFc scFv
QVQLQQWGAGLLKPSETLSLTCAVYGGSFSGYYWSWIRQPPGKCLEWIGDIDASGSTKYNPSLKSRVTISLDTSKNQFSLKLNSVTAADTAVYFCARKKYSTVWSYFDYWRQGTLVTVSSGGGGSGGGGSGGGGSSYELTQPSSVSVPPGQTASITCSGDKLGEKYASWYQQKPGQSPVLIIYQDRKRPSGVPERFSGSNSGNTATLTISGTQAMDEADYYCQAWGSSAAVFGCGTKLTVLS

SEQ ID NO: 152 - protein, 496 aa, Artificial Sequence
  Synthetic Polypeptide
  MISC_FEATURE: MU 8-D7 CC x I2C0-scFc Bispecific molecule
QVQLQQWGAGLLKPSETLSLTCAVYGGSFSGYYWSWIRQPPGKCLEWIGDIDASGSTKYNPSLKSRVTISLDTSKNQFSLKLNSVTAADTAVYFCARKKYSTVWSYFDYWRQGTLVTVSSGGGGSGGGGSGGGGSSYELTQPSSVSVPPGQTASITCSGDKLGEKYASWYQQKPGQSPVLIIYQDRKRPSGVPERFSGSNSGNTATLTISGTQAMDEADYYCQAWGSSAAVFGCGTKLTVLSGGGGSEVQLVESGGGLVQPGGSLKLSCAASGFTFNKYAMNWVRQAPGKGLEWVARIRSKYNNYATYYADSVKDRFTISRDDSKNTAYLQMNNLKTEDTAVYYCVRHGNFGNSYISYWAYWGQGTLVTVSSGGGGSGGGGSGGGGSQTVVTQEPSLTVSPGGTVTLTCGSSTGAVTSGNYPNWVQQKPGQAPRGLIGGTKFLAPGTPARFSGSLLGGKAALTLSGVQPEDEAEYYCVLWYSNRWVFGGGTKLTVL

SEQ ID NO: 153 - protein, 984 aa, Artificial Sequence
  Synthetic Polypeptide
  MISC_FEATURE: MU 8-D7 CC x I2C0-scFc Bispecific HLE molecule
QVQLQQWGAGLLKPSETLSLTCAVYGGSFSGYYWSWIRQPPGKCLEWIGDIDASGSTKYNPSLKSRVTISLDTSKNQFSLKLNSVTAADTAVYFCARKKYSTVWSYFDYWRQGTLVTVSSGGGGSGGGGSGGGGSSYELTQPSSVSVPPGQTASITCSGDKLGEKYASWYQQKPGQSPVLIIYQDRKRPSGVPERFSGSNSGNTATLTISGTQAMDEADYYCQAWGSSAAVFGCGTKLTVLSGGGGSEVQLVESGGGLVQPGGSLKLSCAASGFTFNKYAMNWVRQAPGKGLEWVARIRSKYNNYATYYADSVKDRFTISRDDSKNTAYLQMNNLKTEDTAVYYCVRHGNFGNSYISYWAYWGQGTLVTVSSGGGGSGGGGSGGGGSQTVVTQEPSLTVSPGGTVTLTCGSSTGAVTSGNYPNWVQQKPGQAPRGLIGGTKFLAPGTPARFSGSLLGGKAALTLSGVQPEDEAEYYCVLWYSNRWVFGGGTKLTVLGGGGDKTHTCPPCPAPELLGGPSVFLFPPKPKDTLMISRTPEVTCVVVDVSHEDPEVKFNWYVDGVEVHNAKTKPCEEQYGSTYRCVSVLTVLHQDWLNGKEYKCKVSNKALPAPIEKTISKAKGQPREPQVYTLPPSREEMTKNQVSLTCLVKGFYPSDIAVEWESNGQPENNYKTTPPVLDSDGSFFLYSKLTVDKSRWQQGNVFSCSVMHEALHNHYTQKSLSLSPGKGGGGSGGGGSGGGGSGGGGSGGGGSGGGGSDKTHTCPPCPAPELLGGPSVFLFPPKPKDTLMISRTPEVTCVVVDVSHEDPEVKFNWYVDGVEVHNAKTKPCEEQYGSTYRCVSVLTVLHQDWLNGKEYKCKVSNKALPAPIEKTISKAKGQPREPQVYTLPPSREEMTKNQVSLTCLVKGFYPSDIAVEWESNGQPENNYKTTPPVLDSDGSFFLYSKLTVDKSRWQQGNVFSCSVMHEALHNHYTQKSLSLSPGK

SEQ ID NO: 154 - protein, 5 aa, Artificial Sequence
  Synthetic Polypeptide
  MISC_FEATURE: MU 8-C7 CC x I2C0-scFc VH CDR1
GYYWS

SEQ ID NO: 155 - protein, 16 aa, Artificial Sequence
  Synthetic Polypeptide
  MISC_FEATURE: MU 8-C7 CC x I2C0-scFc VH CDR2
DIDQSGSTKYNPSLKS

SEQ ID NO: 156 - protein, 12 aa, Artificial Sequence
  Synthetic Polypeptide
  MISC_FEATURE: MU 8-C7 CC x I2C0-scFc VH CDR3
KKYSTVWSYFDY

SEQ ID NO: 157 - protein, 11 aa, Artificial Sequence
  Synthetic Polypeptide
  MISC_FEATURE: MU 8-C7 CC x I2C0-scFc VL CDR1
SGDKLGDKYAS

SEQ ID NO: 158 - protein, 7 aa, Artificial Sequence
  Synthetic Polypeptide
  MISC_FEATURE: MU 8-C7 CC x I2C0-scFc VL CDR2
QDRKRPS

SEQ ID NO: 159 - protein, 9 aa, Artificial Sequence
  Synthetic Polypeptide
  MISC_FEATURE: MU 8-C7 CC x I2C0-scFc VL CDR3
QAWGSSAAV

SEQ ID NO: 160 - protein, 120 aa, Artificial Sequence
  Synthetic Polypeptide
  MISC_FEATURE: MU 8-C7 CC x I2C0-scFc VH
QVQLQQWGAGLLKPSETLSLTCAVYGGSFSGYYWSWIRQPPGKCLEWIGDIDQSGSTKYNPSLKSRVTISLDTSKNQFSLKLNSVTAADTAVYFCARKKYSTVWSYFDYWRQGTLVTVSS

SEQ ID NO: 161 - protein, 106 aa, Artificial Sequence
  Synthetic Polypeptide
  MISC_FEATURE: MU 8-C7 CC x I2C0-scFc VL
SYELTQPSSVSVSPGQTASITCSGDKLGDKYASWYQQKPGQSPVLIIYQDRKRPSGVPERFSGSNSGNTATLTISGTQAMDEADYYCQAWGSSAAVFGCGTKLTVL

SEQ ID NO: 162 - protein, 241 aa, Artificial Sequence
  Synthetic Polypeptide
  MISC_FEATURE: MU 8-C7 CC x I2C0-scFc scFv
QVQLQQWGAGLLKPSETLSLTCAVYGGSFSGYYWSWIRQPPGKCLEWIGDIDQSGSTKYNPSLKSRVTISLDTSKNQFSLKLNSVTAADTAVYFCARKKYSTVWSYFDYWRQGTLVTVSSGGGGSGGGGSGGGGSSYELTQPSSVSVSPGQTASITCSGDKLGDKYASWYQQKPGQSPVLIIYQDRKRPSGVPERFSGSNSGNTATLTISGTQAMDEADYYCQAWGSSAAVFGCGTKLTVL

SEQ ID NO: 163 - protein, 496 aa, Artificial Sequence
  Synthetic Polypeptide
  MISC_FEATURE: MU 8-C7 CC x I2C0-scFc Bispecific molecule
QVQLQQWGAGLLKPSETLSLTCAVYGGSFSGYYWSWIRQPPGKCLEWIGDIDQSGSTKYNPSLKSRVTISLDTSKNQFSLKLNSVTAADTAVYFCARKKYSTVWSYFDYWRQGTLVTVSSGGGGSGGGGSGGGGSSYELTQPSSVSVSPGQTASITCSGDKLGDKYASWYQQKPGQSPVLIIYQDRKRPSGVPERFSGSNSGNTATLTISGTQAMDEADYYCQAWGSSAAVFGCGTKLTVLSGGGGSEVQLVESGGGLVQPGGSLKLSCAASGFTFNKYAMNWVRQAPGKGLEWVARIRSKYNNYATYYADSVKDRFTISRDDSKNTAYLQMNNLKTEDTAVYYCVRHGNFGNSYISYWAYWGQGTLVTVSSGGGGSGGGGSGGGGSQTVVTQEPSLTVSPGGTVTLTCGSSTGAVTSGNYPNWVQQKPGQAPRGLIGGTKFLAPGTPARFSGSLLGGKAALTLSGVQPEDEAEYYCVLWYSNRWVFGGGTKLTVL

SEQ ID NO: 164 - protein, 984 aa, Artificial Sequence
  Synthetic Polypeptide
  MISC_FEATURE: MU 8-C7 CC x I2C0-scFc Bispecific HLE molecule
QVQLQQWGAGLLKPSETLSLTCAVYGGSFSGYYWSWIRQPPGKCLEWIGDIDQSGSTKYNPSLKSRVTISLDTSKNQFSLKLNSVTAADTAVYFCARKKYSTVWSYFDYWRQGTLVTVSSGGGGSGGGGSGGGGSSYELTQPSSVSVSPGQTASITCSGDKLGDKYASWYQQKPGQSPVLIIYQDRKRPSGVPERFSGSNSGNTATLTISGTQAMDEADYYCQAWGSSAAVFGCGTKLTVLSGGGGSEVQLVESGGGLVQPGGSLKLSCAASGFTFNKYAMNWVRQAPGKGLEWVARIRSKYNNYATYYADSVKDRFTISRDDSKNTAYLQMNNLKTEDTAVYYCVRHGNFGNSYISYWAYWGQGTLVTVSSGGGGSGGGGSGGGGSQTVVTQEPSLTVSPGGTVTLTCGSSTGAVTSGNYPNWVQQKPGQAPRGLIGGTKFLAPGTPARFSGSLLGGKAALTLSGVQPEDEAEYYCVLWYSNRWVFGGGTKLTVLGGGGDKTHTCPPCPAPELLGGPSVFLFPPKPKDTLMISRTPEVTCVVVDVSHEDPEVKFNWYVDGVEVHNAKTKPCEEQYGSTYRCVSVLTVLHQDWLNGKEYKCKVSNKALPAPIEKTISKAKGQPREPQVYTLPPSREEMTKNQVSLTCLVKGFYPSDIAVEWESNGQPENNYKTTPPVLDSDGSFFLYSKLTVDKSRWQQGNVFSCSVMHEALHNHYTQKSLSLSPGKGGGGSGGGGSGGGGSGGGGSGGGGSGGGGSDKTHTCPPCPAPELLGGPSVFLFPPKPKDTLMISRTPEVTCVVVDVSHEDPEVKFNWYVDGVEVHNAKTKPCEEQYGSTYRCVSVLTVLHQDWLNGKEYKCKVSNKALPAPIEKTISKAKGQPREPQVYTLPPSREEMTKNQVSLTCLVKGFYPSDIAVEWESNGQPENNYKTTPPVLDSDGSFFLYSKLTVDKSRWQQGNVFSCSVMHEALHNHYTQKSLSLSPGK

SEQ ID NO: 165 - protein, 5 aa, Artificial Sequence
  Synthetic Polypeptide
  MISC_FEATURE: MU 8-B8 CC x I2C0-scFc VH CDR1
GYYWS

SEQ ID NO: 166 - protein, 16 aa, Artificial Sequence
  Synthetic Polypeptide
  MISC_FEATURE: MU 8-B8 CC x I2C0-scFc VH CDR2
DIDQSGSTKYNPSLKS

SEQ ID NO: 167 - protein, 12 aa, Artificial Sequence
  Synthetic Polypeptide
  MISC_FEATURE: MU 8-B8 CC x I2C0-scFc VH CDR3
KKYSTVWSYFDY

SEQ ID NO: 168 - protein, 11 aa, Artificial Sequence
  Synthetic Polypeptide
  MISC_FEATURE: MU 8-B8 CC x I2C0-scFc VL CDR1
SGDKLGDKYAS

SEQ ID NO: 169 - protein, 7 aa, Artificial Sequence
  Synthetic Polypeptide
  MISC_FEATURE: MU 8-B8 CC x I2C0-scFc VL CDR2
QDRKRPS

SEQ ID NO: 170 - protein, 9 aa, Artificial Sequence
  Synthetic Polypeptide
  MISC_FEATURE: MU 8-B8 CC x I2C0-scFc VL CDR3
QAWGSSAAV

SEQ ID NO: 171 - protein, 120 aa, Artificial Sequence
  Synthetic Polypeptide
  MISC_FEATURE: MU 8-B8 CC x I2C0-scFc VH
QVQLQQWGAGLLKPSETLSLTCAVYGGSFSGYYWSWIRQPPGKCLEWIGDIDQSGSTKYNPSLKSRVTISLDTSKNQFSLKLNSVTAADTAVYFCARKKYSTVWSYFDYWGQGTLVTVSS

SEQ ID NO: 172 - protein, 106 aa, Artificial Sequence
  Synthetic Polypeptide
  MISC_FEATURE: MU 8-B8 CC x I2C0-scFc VL
SYELTQPPSVSVPPGQTASITCSGDKLGDKYASWYQQKPGQSPVLIIYQDRKRPSGVPERFSGSNSGNTATLTISGTQAMDEADYYCQAWGSSAAVFGCGTKLTVL

SEQ ID NO: 173 - protein, 241 aa, Artificial Sequence
  Synthetic Polypeptide
  MISC_FEATURE: MU 8-B8 CC x I2C0-scFc scFv
QVQLQQWGAGLLKPSETLSLTCAVYGGSFSGYYWSWIRQPPGKCLEWIGDIDQSGSTKYNPSLKSRVTISLDTSKNQFSLKLNSVTAADTAVYFCARKKYSTVWSYFDYWGQGTLVTVSSGGGGSGGGGSGGGGSSYELTQPPSVSVPPGQTASITCSGDKLGDKYASWYQQKPGQSPVLIIYQDRKRPSGVPERFSGSNSGNTATLTISGTQAMDEADYYCQAWGSSAAVFGCGTKLTVL

SEQ ID NO: 174 - protein, 496 aa, Artificial Sequence
  Synthetic Polypeptide
  MISC_FEATURE: MU 8-B8 CC x I2C0-scFc Bispecific molecule
QVQLQQWGAGLLKPSETLSLTCAVYGGSFSGYYWSWIRQPPGKCLEWIGDIDQSGSTKYNPSLKSRVTISLDTSKNQFSLKLNSVTAADTAVYFCARKKYSTVWSYFDYWGQGTLVTVSSGGGGSGGGGSGGGGSSYELTQPPSVSVPPGQTASITCSGDKLGDKYASWYQQKPGQSPVLIIYQDRKRPSGVPERFSGSNSGNTATLTISGTQAMDEADYYCQAWGSSAAVFGCGTKLTVLSGGGGSEVQLVESGGGLVQPGGSLKLSCAASGFTFNKYAMNWVRQAPGKGLEWVARIRSKYNNYATYYADSVKDRFTISRDDSKNTAYLQMNNLKTEDTAVYYCVRHGNFGNSYISYWAYWGQGTLVTVSSGGGGSGGGGSGGGGSQTVVTQEPSLTVSPGGTVTLTCGSSTGAVTSGNYPNWVQQKPGQAPRGLIGGTKFLAPGTPARFSGSLLGGKAALTLSGVQPEDEAEYYCVLWYSNRWVFGGGTKLTVL

SEQ ID NO: 175 - protein, 984 aa, Artificial Sequence
  Synthetic Polypeptide
  MISC_FEATURE: MU 8-B8 CC x I2C0-scFc Bispecific HLE molecule
QVQLQQWGAGLLKPSETLSLTCAVYGGSFSGYYWSWIRQPPGKCLEWIGDIDQSGSTKYNPSLKSRVTISLDTSKNQFSLKLNSVTAADTAVYFCARKKYSTVWSYFDYWGQGTLVTVSSGGGGSGGGGSGGGGSSYELTQPPSVSVPPGQTASITCSGDKLGDKYASWYQQKPGQSPVLIIYQDRKRPSGVPERFSGSNSGNTATLTISGTQAMDEADYYCQAWGSSAAVFGCGTKLTVLSGGGGSEVQLVESGGGLVQPGGSLKLSCAASGFTFNKYAMNWVRQAPGKGLEWVARIRSKYNNYATYYADSVKDRFTISRDDSKNTAYLQMNNLKTEDTAVYYCVRHGNFGNSYISYWAYWGQGTLVTVSSGGGGSGGGGSGGGGSQTVVTQEPSLTVSPGGTVTLTCGSSTGAVTSGNYPNWVQQKPGQAPRGLIGGTKFLAPGTPARFSGSLLGGKAALTLSGVQPEDEAEYYCVLWYSNRWVFGGGTKLTVLGGGGDKTHTCPPCPAPELLGGPSVFLFPPKPKDTLMISRTPEVTCVVVDVSHEDPEVKFNWYVDGVEVHNAKTKPCEEQYGSTYRCVSVLTVLHQDWLNGKEYKCKVSNKALPAPIEKTISKAKGQPREPQVYTLPPSREEMTKNQVSLTCLVKGFYPSDIAVEWESNGQPENNYKTTPPVLDSDGSFFLYSKLTVDKSRWQQGNVFSCSVMHEALHNHYTQKSLSLSPGKGGGGSGGGGSGGGGSGGGGSGGGGSGGGGSDKTHTCPPCPAPELLGGPSVFLFPPKPKDTLMISRTPEVTCVVVDVSHEDPEVKFNWYVDGVEVHNAKTKPCEEQYGSTYRCVSVLTVLHQDWLNGKEYKCKVSNKALPAPIEKTISKAKGQPREPQVYTLPPSREEMTKNQVSLTCLVKGFYPSDIAVEWESNGQPENNYKTTPPVLDSDGSFFLYSKLTVDKSRWQQGNVFSCSVMHEALHNHYTQKSLSLSPGK

SEQ ID NO: 176 - protein, 5 aa, Artificial Sequence
  Synthetic Polypeptide
  MISC_FEATURE: MU 8-B7 CC x I2C0-scFc VH CDR1
GYYWS

SEQ ID NO: 177 - protein, 16 aa, Artificial Sequence
  Synthetic Polypeptide
  MISC_FEATURE: MU 8-B7 CC x I2C0-scFc VH CDR2
DIDASGSTKYNPSLKS

SEQ ID NO: 178 - protein, 12 aa, Artificial Sequence
  Synthetic Polypeptide
  MISC_FEATURE: MU 8-B7 CC x I2C0-scFc VH CDR3
KKYSTVWSYFDN

SEQ ID NO: 179 - protein, 11 aa, Artificial Sequence
  Synthetic Polypeptide
  MISC_FEATURE: MU 8-B7 CC x I2C0-scFc VL CDR1
SGDKLGDKYAS

SEQ ID NO: 180 - protein, 7 aa, Artificial Sequence
  Synthetic Polypeptide
  MISC_FEATURE: MU 8-B7 CC x I2C0-scFc VL CDR2
QDRKRPS

SEQ ID NO: 181 - protein, 9 aa, Artificial Sequence
  Synthetic Polypeptide
  MISC_FEATURE: MU 8-B7 CC x I2C0-scFc VL CDR3
QAWGSSTAV

SEQ ID NO: 182 - protein, 120 aa, Artificial Sequence
  Synthetic Polypeptide
  MISC_FEATURE: MU 8-B7 CC x I2C0-scFc VH
QVQLQQWGAGLLKPSETLSLTCAVYGGSFSGYYWSWIRQPPGKCLEWIGDIDASGSTKYNPSLKSRVTISLDTSKNQFSLKLNSVTAADTAVYFCARKKYSTVWSYFDNWGQGTLVTVSS

SEQ ID NO: 183 - protein, 106 aa, Artificial Sequence
  Synthetic Polypeptide
  MISC_FEATURE: MU 8-B7 CC x I2C0-scFc VL
SYELTQPSSVSVPPGQTASITCSGDKLGDKYASWYQQKPGQSPVLVIYQDRKRPSGVPERFSGSNSGNTATLTISGTQAMDEADYYCQAWGSSTAVFGCGTKLTVL

SEQ ID NO: 184 - protein, 241 aa, Artificial Sequence
  Synthetic Polypeptide
  MISC_FEATURE: MU 8-B7 CC x I2C0-scFc scFv
QVQLQQWGAGLLKPSETLSLTCAVYGGSFSGYYWSWIRQPPGKCLEWIGDIDASGSTKYNPSLKSRVTISLDTSKNQFSLKLNSVTAADTAVYFCARKKYSTVWSYFDNWGQGTLVTVSSGGGGSGGGGSGGGGSSYELTQPSSVSVPPGQTASITCSGDKLGDKYASWYQQKPGQSPVLVIYQDRKRPSGVPERFSGSNSGNTATLTISGTQAMDEADYYCQAWGSSTAVFGCGTKLTVL

SEQ ID NO: 185 - protein, 496 aa, Artificial Sequence
  Synthetic Polypeptide
  MISC_FEATURE: MU 8-B7 CC x I2C0-scFc Bispecific molecule
QVQLQQWGAGLLKPSETLSLTCAVYGGSFSGYYWSWIRQPPGKCLEWIGDIDASGSTKYNPSLKSRVTISLDTSKNQFSLKLNSVTAADTAVYFCARKKYSTVWSYFDNWGQGTLVTVSSGGGGSGGGGSGGGGSSYELTQPSSVSVPPGQTASITCSGDKLGDKYASWYQQKPGQSPVLVIYQDRKRPSGVPERFSGSNSGNTATLTISGTQAMDEADYYCQAWGSSTAVFGCGTKLTVLSGGGGSEVQLVESGGGLVQPGGSLKLSCAASGFTFNKYAMNWVRQAPGKGLEWVARIRSKYNNYATYYADSVKDRFTISRDDSKNTAYLQMNNLKTEDTAVYYCVRHGNFGNSYISYWAYWGQGTLVTVSSGGGGSGGGGSGGGGSQTVVTQEPSLTVSPGGTVTLTCGSSTGAVTSGNYPNWVQQKPGQAPRGLIGGTKFLAPGTPARFSGSLLGGKAALTLSGVQPEDEAEYYCVLWYSNRWVFGGGTKLTVL

SEQ ID NO: 186 - protein, 984 aa, Artificial Sequence
  Synthetic Polypeptide
  MISC_FEATURE: MU 8-B7 CC x I2C0-scFc Bispecific HLE molecule
QVQLQQWGAGLLKPSETLSLTCAVYGGSFSGYYWSWIRQPPGKCLEWIGDIDASGSTKYNPSLKSRVTISLDTSKNQFSLKLNSVTAADTAVYFCARKKYSTVWSYFDNWGQGTLVTVSSGGGGSGGGGSGGGGSSYELTQPSSVSVPPGQTASITCSGDKLGDKYASWYQQKPGQSPVLVIYQDRKRPSGVPERFSGSNSGNTATLTISGTQAMDEADYYCQAWGSSTAVFGCGTKLTVLSGGGGSEVQLVESGGGLVQPGGSLKLSCAASGFTFNKYAMNWVRQAPGKGLEWVARIRSKYNNYATYYADSVKDRFTISRDDSKNTAYLQMNNLKTEDTAVYYCVRHGNFGNSYISYWAYWGQGTLVTVSSGGGGSGGGGSGGGGSQTVVTQEPSLTVSPGGTVTLTCGSSTGAVTSGNYPNWVQQKPGQAPRGLIGGTKFLAPGTPARFSGSLLGGKAALTLSGVQPEDEAEYYCVLWYSNRWVFGGGTKLTVLGGGGDKTHTCPPCPAPELLGGPSVFLFPPKPKDTLMISRTPEVTCVVVDVSHEDPEVKFNWYVDGVEVHNAKTKPCEEQYGSTYRCVSVLTVLHQDWLNGKEYKCKVSNKALPAPIEKTISKAKGQPREPQVYTLPPSREEMTKNQVSLTCLVKGFYPSDIAVEWESNGQPENNYKTTPPVLDSDGSFFLYSKLTVDKSRWQQGNVFSCSVMHEALHNHYTQKSLSLSPGKGGGGSGGGGSGGGGSGGGGSGGGGSGGGGSDKTHTCPPCPAPELLGGPSVFLFPPKPKDTLMISRTPEVTCVVVDVSHEDPEVKFNWYVDGVEVHNAKTKPCEEQYGSTYRCVSVLTVLHQDWLNGKEYKCKVSNKALPAPIEKTISKAKGQPREPQVYTLPPSREEMTKNQVSLTCLVKGFYPSDIAVEWESNGQPENNYKTTPPVLDSDGSFFLYSKLTVDKSRWQQGNVFSCSVMHEALHNHYTQKSLSLSPGK

SEQ ID NO: 187 - protein, 5 aa, Artificial Sequence
  Synthetic Polypeptide
  MISC_FEATURE: MU 8-A7 CC x I2C0-scFc VH CDR1
GYYWS

SEQ ID NO: 188 - protein, 16 aa, Artificial Sequence
  Synthetic Polypeptide
  MISC_FEATURE: MU 8-A7 CC x I2C0-scFc VH CDR2
DIDQSGSTKYNPSLKS

SEQ ID NO: 189 - protein, 12 aa, Artificial Sequence
  Synthetic Polypeptide
  MISC_FEATURE: MU 8-A7 CC x I2C0-scFc VH CDR3
KKYSTVWSYFDY

SEQ ID NO: 190 - protein, 11 aa, Artificial Sequence
  Synthetic Polypeptide
  MISC_FEATURE: MU 8-A7 CC x I2C0-scFc VL CDR1
SGDKLGDKYAS

SEQ ID NO: 191 - protein, 7 aa, Artificial Sequence
  Synthetic Polypeptide
  MISC_FEATURE: MU 8-A7 CC x I2C0-scFc VL CDR2
QDRKRPS

SEQ ID NO: 192 - protein, 9 aa, Artificial Sequence
  Synthetic Polypeptide
  MISC_FEATURE: MU 8-A7 CC x I2C0-scFc VL CDR3
QAWGSSTAV

SEQ ID NO: 193 - protein, 120 aa, Artificial Sequence; identical to SEQ ID NO: 171
  Synthetic Polypeptide
  MISC_FEATURE: MU 8-A7 CC x I2C0-scFc VH

SEQ ID NO: 194 - protein, 106 aa, Artificial Sequence; identical to SEQ ID NO: 183
  Synthetic Polypeptide
  MISC_FEATURE: MU 8-A7 CC x I2C0-scFc VL

SEQ ID NO: 195 - protein, 241 aa, Artificial Sequence
  Synthetic Polypeptide
  MISC_FEATURE: MU 8-A7 CC x I2C0-scFc scFv
QVQLQQWGAGLLKPSETLSLTCAVYGGSFSGYYWSWIRQPPGKCLEWIGDIDQSGSTKYNPSLKSRVTISLDTSKNQFSLKLNSVTAADTAVYFCARKKYSTVWSYFDYWGQGTLVTVSSGGGGSGGGGSGGGGSSYELTQPSSVSVPPGQTASITCSGDKLGDKYASWYQQKPGQSPVLVIYQDRKRPSGVPERFSGSNSGNTATLTISGTQAMDEADYYCQAWGSSTAVFGCGTKLTVL

SEQ ID NO: 196 - protein, 496 aa, Artificial Sequence
  Synthetic Polypeptide
  MISC_FEATURE: MU 8-A7 CC x I2C0-scFc Bispecific molecule
QVQLQQWGAGLLKPSETLSLTCAVYGGSFSGYYWSWIRQPPGKCLEWIGDIDQSGSTKYNPSLKSRVTISLDTSKNQFSLKLNSVTAADTAVYFCARKKYSTVWSYFDYWGQGTLVTVSSGGGGSGGGGSGGGGSSYELTQPSSVSVPPGQTASITCSGDKLGDKYASWYQQKPGQSPVLVIYQDRKRPSGVPERFSGSNSGNTATLTISGTQAMDEADYYCQAWGSSTAVFGCGTKLTVLSGGGGSEVQLVESGGGLVQPGGSLKLSCAASGFTFNKYAMNWVRQAPGKGLEWVARIRSKYNNYATYYADSVKDRFTISRDDSKNTAYLQMNNLKTEDTAVYYCVRHGNFGNSYISYWAYWGQGTLVTVSSGGGGSGGGGSGGGGSQTVVTQEPSLTVSPGGTVTLTCGSSTGAVTSGNYPNWVQQKPGQAPRGLIGGTKFLAPGTPARFSGSLLGGKAALTLSGVQPEDEAEYYCVLWYSNRWVFGGGTKLTVL

SEQ ID NO: 197 - protein, 984 aa, Artificial Sequence
  Synthetic Polypeptide
  MISC_FEATURE: MU 8-A7 CC x I2C0-scFc Bispecific HLE molecule
QVQLQQWGAGLLKPSETLSLTCAVYGGSFSGYYWSWIRQPPGKCLEWIGDIDQSGSTKYNPSLKSRVTISLDTSKNQFSLKLNSVTAADTAVYFCARKKYSTVWSYFDYWGQGTLVTVSSGGGGSGGGGSGGGGSSYELTQPSSVSVPPGQTASITCSGDKLGDKYASWYQQKPGQSPVLVIYQDRKRPSGVPERFSGSNSGNTATLTISGTQAMDEADYYCQAWGSSTAVFGCGTKLTVLSGGGGSEVQLVESGGGLVQPGGSLKLSCAASGFTFNKYAMNWVRQAPGKGLEWVARIRSKYNNYATYYADSVKDRFTISRDDSKNTAYLQMNNLKTEDTAVYYCVRHGNFGNSYISYWAYWGQGTLVTVSSGGGGSGGGGSGGGGSQTVVTQEPSLTVSPGGTVTLTCGSSTGAVTSGNYPNWVQQKPGQAPRGLIGGTKFLAPGTPARFSGSLLGGKAALTLSGVQPEDEAEYYCVLWYSNRWVFGGGTKLTVLGGGGDKTHTCPPCPAPELLGGPSVFLFPPKPKDTLMISRTPEVTCVVVDVSHEDPEVKFNWYVDGVEVHNAKTKPCEEQYGSTYRCVSVLTVLHQDWLNGKEYKCKVSNKALPAPIEKTISKAKGQPREPQVYTLPPSREEMTKNQVSLTCLVKGFYPSDIAVEWESNGQPENNYKTTPPVLDSDGSFFLYSKLTVDKSRWQQGNVFSCSVMHEALHNHYTQKSLSLSPGKGGGGSGGGGSGGGGSGGGGSGGGGSGGGGSDKTHTCPPCPAPELLGGPSVFLFPPKPKDTLMISRTPEVTCVVVDVSHEDPEVKFNWYVDGVEVHNAKTKPCEEQYGSTYRCVSVLTVLHQDWLNGKEYKCKVSNKALPAPIEKTISKAKGQPREPQVYTLPPSREEMTKNQVSLTCLVKGFYPSDIAVEWESNGQPENNYKTTPPVLDSDGSFFLYSKLTVDKSRWQQGNVFSCSVMHEALHNHYTQKSLSLSPGK

SEQ ID NO: 198 - protein, 5 aa, Artificial Sequence
  Synthetic Polypeptide
  MISC_FEATURE: MU 7-G6 CC x I2C0-scFc VH CDR1
SYGMH

SEQ ID NO: 199 - protein, 17 aa, Artificial Sequence
  Synthetic Polypeptide
  MISC_FEATURE: MU 7-G6 CC x I2C0-scFc VH CDR2
VIWYSGSNKYYATSVKG

SEQ ID NO: 200 - protein, 9 aa, Artificial Sequence
  Synthetic Polypeptide
  MISC_FEATURE: MU 7-G6 CC x I2C0-scFc VH CDR3
GAYTYGFDY

SEQ ID NO: 201 - protein, 11 aa, Artificial Sequence
  Synthetic Polypeptide
  MISC_FEATURE: MU 7-G6 CC x I2C0-scFc VL CDR1
RASQSINRYLA

SEQ ID NO: 202 - protein, 7 aa, Artificial Sequence
  Synthetic Polypeptide
  MISC_FEATURE: MU 7-G6 CC x I2C0-scFc VL CDR2
TASNRAT

SEQ ID NO: 203 - protein, 9 aa, Artificial Sequence
  Synthetic Polypeptide
  MISC_FEATURE: MU 7-G6 CC x I2C0-scFc VL CDR3
HHYGSSIFT

SEQ ID NO: 204 - protein, 118 aa, Artificial Sequence
  Synthetic Polypeptide
  MISC_FEATURE: MU 7-G6 CC x I2C0-scFc VH
QVQLVESGGGVVKPGGSLRLSCAASGFTFSSYGMHWVRQAPGKCLEWVAVIWYSGSNKYYATSVKGRFTISRDNSKNTLYLQMNNLRAEDTAVYYCARGAYTYGFDYWGQGTLVTVSS

SEQ ID NO: 205 - protein, 107 aa, Artificial Sequence
  Synthetic Polypeptide
  MISC_FEATURE: MU 7-G6 CC x I2C0-scFc VL
EIVLTQSPGTLSLSPGERATLSCRASQSINRYLAWYQQKPGQAPRLLIYTASNRATGIPDRFSGSGSGTDFTLTISRLEPEDFAVYYCHHYGSSIFTFGCGTKVEIK

SEQ ID NO: 206 - protein, 240 aa, Artificial Sequence
  Synthetic Polypeptide
  MISC_FEATURE: MU 7-G6 CC x I2C0-scFc scFv
QVQLVESGGGVVKPGGSLRLSCAASGFTFSSYGMHWVRQAPGKCLEWVAVIWYSGSNKYYATSVKGRFTISRDNSKNTLYLQMNNLRAEDTAVYYCARGAYTYGFDYWGQGTLVTVSSGGGGSGGGGSGGGGSEIVLTQSPGTLSLSPGERATLSCRASQSINRYLAWYQQKPGQAPRLLIYTASNRATGIPDRFSGSGSGTDFTLTISRLEPEDFAVYYCHHYGSSIFTFGCGTKVEIK

SEQ ID NO: 207 - protein, 495 aa, Artificial Sequence
  Synthetic Polypeptide
  MISC_FEATURE: MU 7-G6 CC x I2C0-scFc Bispecific molecule
QVQLVESGGGVVKPGGSLRLSCAASGFTFSSYGMHWVRQAPGKCLEWVAVIWYSGSNKYYATSVKGRFTISRDNSKNTLYLQMNNLRAEDTAVYYCARGAYTYGFDYWGQGTLVTVSSGGGGSGGGGSGGGGSEIVLTQSPGTLSLSPGERATLSCRASQSINRYLAWYQQKPGQAPRLLIYTASNRATGIPDRFSGSGSGTDFTLTISRLEPEDFAVYYCHHYGSSIFTFGCGTKVEIKSGGGGSEVQLVESGGGLVQPGGSLKLSCAASGFTFNKYAMNWVRQAPGKGLEWVARIRSKYNNYATYYADSVKDRFTISRDDSKNTAYLQMNNLKTEDTAVYYCVRHGNFGNSYISYWAYWGQGTLVTVSSGGGGSGGGGSGGGGSQTVVTQEPSLTVSPGGTVTLTCGSSTGAVTSGNYPNWVQQKPGQAPRGLIGGTKFLAPGTPARFSGSLLGGKAALTLSGVQPEDEAEYYCVLWYSNRWVFGGGTKLTVL

SEQ ID NO: 208 - protein, 983 aa, Artificial Sequence
  Synthetic Polypeptide
  MISC_FEATURE: MU 7-G6 CC x I2C0-scFc Bispecific HLE molecule
QVQLVESGGGVVKPGGSLRLSCAASGFTFSSYGMHWVRQAPGKCLEWVAVIWYSGSNKYYATSVKGRFTISRDNSKNTLYLQMNNLRAEDTAVYYCARGAYTYGFDYWGQGTLVTVSSGGGGSGGGGSGGGGSEIVLTQSPGTLSLSPGERATLSCRASQSINRYLAWYQQKPGQAPRLLIYTASNRATGIPDRFSGSGSGTDFTLTISRLEPEDFAVYYCHHYGSSIFTFGCGTKVEIKSGGGGSEVQLVESGGGLVQPGGSLKLSCAASGFTFNKYAMNWVRQAPGKGLEWVARIRSKYNNYATYYADSVKDRFTISRDDSKNTAYLQMNNLKTEDTAVYYCVRHGNFGNSYISYWAYWGQGTLVTVSSGGGGSGGGGSGGGGSQTVVTQEPSLTVSPGGTVTLTCGSSTGAVTSGNYPNWVQQKPGQAPRGLIGGTKFLAPGTPARFSGSLLGGKAALTLSGVQPEDEAEYYCVLWYSNRWVFGGGTKLTVLGGGGDKTHTCPPCPAPELLGGPSVFLFPPKPKDTLMISRTPEVTCVVVDVSHEDPEVKFNWYVDGVEVHNAKTKPCEEQYGSTYRCVSVLTVLHQDWLNGKEYKCKVSNKALPAPIEKTISKAKGQPREPQVYTLPPSREEMTKNQVSLTCLVKGFYPSDIAVEWESNGQPENNYKTTPPVLDSDGSFFLYSKLTVDKSRWQQGNVFSCSVMHEALHNHYTQKSLSLSPGKGGGGSGGGGSGGGGSGGGGSGGGGSGGGGSDKTHTCPPCPAPELLGGPSVFLFPPKPKDTLMISRTPEVTCVVVDVSHEDPEVKFNWYVDGVEVHNAKTKPCEEQYGSTYRCVSVLTVLHQDWLNGKEYKCKVSNKALPAPIEKTISKAKGQPREPQVYTLPPSREEMTKNQVSLTCLVKGFYPSDIAVEWESNGQPENNYKTTPPVLDSDGSFFLYSKLTVDKSRWQQGNVFSCSVMHEALHNHYTQKSLSLSPGK

SEQ ID NO: 209 - protein, 5 aa, Artificial Sequence
  Synthetic Polypeptide
  MISC_FEATURE: MU 6-B12 CC x I2C0-scFc VH CDR1
SYGMH

SEQ ID NO: 210 - protein, 17 aa, Artificial Sequence
  Synthetic Polypeptide
  MISC_FEATURE: MU 6-B12 CC x I2C0-scFc VH CDR2
VIWFDASNKYYAESVKG

SEQ ID NO: 211 - protein, 9 aa, Artificial Sequence
  Synthetic Polypeptide
  MISC_FEATURE: MU 6-B12 CC x I2C0-scFc VH CDR3
GAYTYGFDY

SEQ ID NO: 212 - protein, 11 aa, Artificial Sequence
  Synthetic Polypeptide
  MISC_FEATURE: MU 6-B12 CC x I2C0-scFc VL CDR1
RASQSINRYLA

SEQ ID NO: 213 - protein, 7 aa, Artificial Sequence
  Synthetic Polypeptide
  MISC_FEATURE: MU 6-B12 CC x I2C0-scFc VL CDR2
TASNRAT

SEQ ID NO: 214 - protein, 9 aa, Artificial Sequence
  Synthetic Polypeptide
  MISC_FEATURE: MU 6-B12 CC x I2C0-scFc VL CDR3
HHYGSSIFT

SEQ ID NO: 215 - protein, 118 aa, Artificial Sequence
  Synthetic Polypeptide
  MISC_FEATURE: MU 6-B12 CC x I2C0-scFc VH
QVQLVESGGGVVKPGRSLRLSCAASGFTFSSYGMHWVRQAPGKCLEWVAVIWFDASNKYYAESVKGRFTISRDNSKNTLYLQMNNLRAEDTAVYYCARGAYTYGFDYWGQGTLVTVSS

SEQ ID NO: 216 - protein, 107 aa, Artificial Sequence; identical to SEQ ID NO: 205
  Synthetic Polypeptide
  MISC_FEATURE: MU 6-B12 CC x I2C0-scFc VL

SEQ ID NO: 217 - protein, 240 aa, Artificial Sequence
  Synthetic Polypeptide
  MISC_FEATURE: MU 6-B12 CC x I2C0-scFc scFv
QVQLVESGGGVVKPGRSLRLSCAASGFTFSSYGMHWVRQAPGKCLEWVAVIWFDASNKYYAESVKGRFTISRDNSKNTLYLQMNNLRAEDTAVYYCARGAYTYGFDYWGQGTLVTVSSGGGGSGGGGSGGGGSEIVLTQSPGTLSLSPGERATLSCRASQSINRYLAWYQQKPGQAPRLLIYTASNRATGIPDRFSGSGSGTDFTLTISRLEPEDFAVYYCHHYGSSIFTFGCGTKVEIK

SEQ ID NO: 218 - protein, 495 aa, Artificial Sequence
  Synthetic Polypeptide
  MISC_FEATURE: MU 6-B12 CC x I2C0-scFc Bispecific molecule
QVQLVESGGGVVKPGRSLRLSCAASGFTFSSYGMHWVRQAPGKCLEWVAVIWFDASNKYYAESVKGRFTISRDNSKNTLYLQMNNLRAEDTAVYYCARGAYTYGFDYWGQGTLVTVSSGGGGSGGGGSGGGGSEIVLTQSPGTLSLSPGERATLSCRASQSINRYLAWYQQKPGQAPRLLIYTASNRATGIPDRFSGSGSGTDFTLTISRLEPEDFAVYYCHHYGSSIFTFGCGTKVEIKSGGGGSEVQLVESGGGLVQPGGSLKLSCAASGFTFNKYAMNWVRQAPGKGLEWVARIRSKYNNYATYYADSVKDRFTISRDDSKNTAYLQMNNLKTEDTAVYYCVRHGNFGNSYISYWAYWGQGTLVTVSSGGGGSGGGGSGGGGSQTVVTQEPSLTVSPGGTVTLTCGSSTGAVTSGNYPNWVQQKPGQAPRGLIGGTKFLAPGTPARFSGSLLGGKAALTLSGVQPEDEAEYYCVLWYSNRWVFGGGTKLTVL

SEQ ID NO: 219 - protein, 983 aa, Artificial Sequence
  Synthetic Polypeptide
  MISC_FEATURE: MU 6-B12 CC x I2C0-scFc Bispecific HLE molecule
QVQLVESGGGVVKPGRSLRLSCAASGFTFSSYGMHWVRQAPGKCLEWVAVIWFDASNKYYAESVKGRFTISRDNSKNTLYLQMNNLRAEDTAVYYCARGAYTYGFDYWGQGTLVTVSSGGGGSGGGGSGGGGSEIVLTQSPGTLSLSPGERATLSCRASQSINRYLAWYQQKPGQAPRLLIYTASNRATGIPDRFSGSGSGTDFTLTISRLEPEDFAVYYCHHYGSSIFTFGCGTKVEIKSGGGGSEVQLVESGGGLVQPGGSLKLSCAASGFTFNKYAMNWVRQAPGKGLEWVARIRSKYNNYATYYADSVKDRFTISRDDSKNTAYLQMNNLKTEDTAVYYCVRHGNFGNSYISYWAYWGQGTLVTVSSGGGGSGGGGSGGGGSQTVVTQEPSLTVSPGGTVTLTCGSSTGAVTSGNYPNWVQQKPGQAPRGLIGGTKFLAPGTPARFSGSLLGGKAALTLSGVQPEDEAEYYCVLWYSNRWVFGGGTKLTVLGGGGDKTHTCPPCPAPELLGGPSVFLFPPKPKDTLMISRTPEVTCVVVDVSHEDPEVKFNWYVDGVEVHNAKTKPCEEQYGSTYRCVSVLTVLHQDWLNGKEYKCKVSNKALPAPIEKTISKAKGQPREPQVYTLPPSREEMTKNQVSLTCLVKGFYPSDIAVEWESNGQPENNYKTTPPVLDSDGSFFLYSKLTVDKSRWQQGNVFSCSVMHEALHNHYTQKSLSLSPGKGGGGSGGGGSGGGGSGGGGSGGGGSGGGGSDKTHTCPPCPAPELLGGPSVFLFPPKPKDTLMISRTPEVTCVVVDVSHEDPEVKFNWYVDGVEVHNAKTKPCEEQYGSTYRCVSVLTVLHQDWLNGKEYKCKVSNKALPAPIEKTISKAKGQPREPQVYTLPPSREEMTKNQVSLTCLVKGFYPSDIAVEWESNGQPENNYKTTPPVLDSDGSFFLYSKLTVDKSRWQQGNVFSCSVMHEALHNHYTQKSLSLSPGK

SEQ ID NO: 220 - protein, 5 aa, Artificial Sequence
  Synthetic Polypeptide
  MISC_FEATURE: MU 5-H4 CC x I2C0-scFc VH CDR1
SYGMH

SEQ ID NO: 221 - protein, 17 aa, Artificial Sequence
  Synthetic Polypeptide
  MISC_FEATURE: MU 5-H4 CC x I2C0-scFc VH CDR2
VIWFQGSNKYYADAVKG

SEQ ID NO: 222 - protein, 9 aa, Artificial Sequence
  Synthetic Polypeptide
  MISC_FEATURE: MU 5-H4 CC x I2C0-scFc VH CDR3
GGYTYGFDY

SEQ ID NO: 223 - protein, 11 aa, Artificial Sequence
  Synthetic Polypeptide
  MISC_FEATURE: MU 5-H4 CC x I2C0-scFc VL CDR1
RASQSINRYLA

SEQ ID NO: 224 - protein, 7 aa, Artificial Sequence
  Synthetic Polypeptide
  MISC_FEATURE: MU 5-H4 CC x I2C0-scFc VL CDR2
TASNRAT

SEQ ID NO: 225 - protein, 9 aa, Artificial Sequence
  Synthetic Polypeptide
  MISC_FEATURE: MU 5-H4 CC x I2C0-scFc VL CDR3
HHYGSSIFT

SEQ ID NO: 226 - protein, 118 aa, Artificial Sequence
  Synthetic Polypeptide
  MISC_FEATURE: MU 5-H4 CC x I2C0-scFc VH
QVQLVESGGGLVQPGGSLRLSCAASGFTFSSYGMHWVRQAPGKCLEWVAVIWFQGSNKYYADAVKGRFTISRDNSKNTLYLQMNNLRAEDTAVYYCARGGYTYGFDYWGQGTLVTVSS

SEQ ID NO: 227 - protein, 107 aa, Artificial Sequence; identical to SEQ ID NO: 205
  Synthetic Polypeptide
  MISC_FEATURE: MU 5-H4 CC x I2C0-scFc VL

SEQ ID NO: 228 - protein, 240 aa, Artificial Sequence
  Synthetic Polypeptide
  MISC_FEATURE: MU 5-H4 CC x I2C0-scFc scFv
QVQLVESGGGLVQPGGSLRLSCAASGFTFSSYGMHWVRQAPGKCLEWVAVIWFQGSNKYYADAVKGRFTISRDNSKNTLYLQMNNLRAEDTAVYYCARGGYTYGFDYWGQGTLVTVSSGGGGSGGGGSGGGGSEIVLTQSPGTLSLSPGERATLSCRASQSINRYLAWYQQKPGQAPRLLIYTASNRATGIPDRFSGSGSGTDFTLTISRLEPEDFAVYYCHHYGSSIFTFGCGTKVEIK

SEQ ID NO: 229 - protein, 495 aa, Artificial Sequence
  Synthetic Polypeptide
  MISC_FEATURE: MU 5-H4 CC x I2C0-scFc Bispecific molecule
QVQLVESGGGLVQPGGSLRLSCAASGFTFSSYGMHWVRQAPGKCLEWVAVIWFQGSNKYYADAVKGRFTISRDNSKNTLYLQMNNLRAEDTAVYYCARGGYTYGFDYWGQGTLVTVSSGGGGSGGGGSGGGGSEIVLTQSPGTLSLSPGERATLSCRASQSINRYLAWYQQKPGQAPRLLIYTASNRATGIPDRFSGSGSGTDFTLTISRLEPEDFAVYYCHHYGSSIFTFGCGTKVEIKSGGGGSEVQLVESGGGLVQPGGSLKLSCAASGFTFNKYAMNWVRQAPGKGLEWVARIRSKYNNYATYYADSVKDRFTISRDDSKNTAYLQMNNLKTEDTAVYYCVRHGNFGNSYISYWAYWGQGTLVTVSSGGGGSGGGGSGGGGSQTVVTQEPSLTVSPGGTVTLTCGSSTGAVTSGNYPNWVQQKPGQAPRGLIGGTKFLAPGTPARFSGSLLGGKAALTLSGVQPEDEAEYYCVLWYSNRWVFGGGTKLTVL

SEQ ID NO: 230 - protein, 983 aa, Artificial Sequence
  Synthetic Polypeptide
  MISC_FEATURE: MU 5-H4 CC x I2C0-scFc Bispecific HLE molecule
QVQLVESGGGLVQPGGSLRLSCAASGFTFSSYGMHWVRQAPGKCLEWVAVIWFQGSNKYYADAVKGRFTISRDNSKNTLYLQMNNLRAEDTAVYYCARGGYTYGFDYWGQGTLVTVSSGGGGSGGGGSGGGGSEIVLTQSPGTLSLSPGERATLSCRASQSINRYLAWYQQKPGQAPRLLIYTASNRATGIPDRFSGSGSGTDFTLTISRLEPEDFAVYYCHHYGSSIFTFGCGTKVEIKSGGGGSEVQLVESGGGLVQPGGSLKLSCAASGFTFNKYAMNWVRQAPGKGLEWVARIRSKYNNYATYYADSVKDRFTISRDDSKNTAYLQMNNLKTEDTAVYYCVRHGNFGNSYISYWAYWGQGTLVTVSSGGGGSGGGGSGGGGSQTVVTQEPSLTVSPGGTVTLTCGSSTGAVTSGNYPNWVQQKPGQAPRGLIGGTKFLAPGTPARFSGSLLGGKAALTLSGVQPEDEAEYYCVLWYSNRWVFGGGTKLTVLGGGGDKTHTCPPCPAPELLGGPSVFLFPPKPKDTLMISRTPEVTCVVVDVSHEDPEVKFNWYVDGVEVHNAKTKPCEEQYGSTYRCVSVLTVLHQDWLNGKEYKCKVSNKALPAPIEKTISKAKGQPREPQVYTLPPSREEMTKNQVSLTCLVKGFYPSDIAVEWESNGQPENNYKTTPPVLDSDGSFFLYSKLTVDKSRWQQGNVFSCSVMHEALHNHYTQKSLSLSPGKGGGGSGGGGSGGGGSGGGGSGGGGSGGGGSDKTHTCPPCPAPELLGGPSVFLFPPKPKDTLMISRTPEVTCVVVDVSHEDPEVKFNWYVDGVEVHNAKTKPCEEQYGSTYRCVSVLTVLHQDWLNGKEYKCKVSNKALPAPIEKTISKAKGQPREPQVYTLPPSREEMTKNQVSLTCLVKGFYPSDIAVEWESNGQPENNYKTTPPVLDSDGSFFLYSKLTVDKSRWQQGNVFSCSVMHEALHNHYTQKSLSLSPGK

SEQ ID NO: 231 - protein, 7 aa, Artificial Sequence
  Synthetic Polypeptide
  MISC_FEATURE: MU 5-H1 CC x I2C0-scFc VH CDR1
SGGYNWA

SEQ ID NO: 232 - protein, 16 aa, Artificial Sequence
  Synthetic Polypeptide
  MISC_FEATURE: MU 5-H1 CC x I2C0-scFc VH CDR2
YIYYSGSTYYNPSLKS

SEQ ID NO: 233 - protein, 12 aa, Artificial Sequence
  Synthetic Polypeptide
  MISC_FEATURE: MU 5-H1 CC x I2C0-scFc VH CDR3
EKYSSRWTFFDY

SEQ ID NO: 234 - protein, 11 aa, Artificial Sequence
  Synthetic Polypeptide
  MISC_FEATURE: MU 5-H1 CC x I2C0-scFc VL CDR1
SGDKLGDNYAS

SEQ ID NO: 235 - protein, 7 aa, Artificial Sequence
  Synthetic Polypeptide
  MISC_FEATURE: MU 5-H1 CC x I2C0-scFc VL CDR2
HDNKRPS

SEQ ID NO: 236 - protein, 9 aa, Artificial Sequence
  Synthetic Polypeptide
  MISC_FEATURE: MU 5-H1 CC x I2C0-scFc VL CDR3
QAFQSSTVV

SEQ ID NO: 237 - protein, 122 aa, Artificial Sequence
  Synthetic Polypeptide
  MISC_FEATURE: MU 5-H1 CC x I2C0-scFc VH
QVQLQESGPGLVKPSETLSLTCTVSGDSISSGGYNWAWIRQHPGKCLEWIGYIYYSGSTYYNPSLKSRVTISVDTSKNQFSLKLSSVTAADTAVYYCAREKYSSRWTFFDYWGQGTLVTVSS

SEQ ID NO: 238 - protein, 106 aa, Artificial Sequence
  Synthetic Polypeptide
  MISC_FEATURE: MU 5-H1 CC x I2C0-scFc VL
SYELTQPPSVSVSPGQTASITCSGDKLGDNYASWYQQKPGQSPVLVIYHDNKRPSGIPERFSGSNSGNTATLTISGTQAMDEADYYCQAFQSSTVVFGCGTKLTVL

SEQ ID NO: 239 - protein, 243 aa, Artificial Sequence
  Synthetic Polypeptide
  MISC_FEATURE: MU 5-H1 CC x I2C0-scFc scFv
QVQLQESGPGLVKPSETLSLTCTVSGDSISSGGYNWAWIRQHPGKCLEWIGYIYYSGSTYYNPSLKSRVTISVDTSKNQFSLKLSSVTAADTAVYYCAREKYSSRWTFFDYWGQGTLVTVSSGGGGSGGGGSGGGGSSYELTQPPSVSVSPGQTASITCSGDKLGDNYASWYQQKPGQSPVLVIYHDNKRPSGIPERFSGSNSGNTATLTISGTQAMDEADYYCQAFQSSTVVFGCGTKLTVL

SEQ ID NO: 240 - protein, 498 aa, Artificial Sequence
  Synthetic Polypeptide
  MISC_FEATURE: MU 5-H1 CC x I2C0-scFc Bispecific molecule
QVQLQESGPGLVKPSETLSLTCTVSGDSISSGGYNWAWIRQHPGKCLEWIGYIYYSGSTYYNPSLKSRVTISVDTSKNQFSLKLSSVTAADTAVYYCAREKYSSRWTFFDYWGQGTLVTVSSGGGGSGGGGSGGGGSSYELTQPPSVSVSPGQTASITCSGDKLGDNYASWYQQKPGQSPVLVIYHDNKRPSGIPERFSGSNSGNTATLTISGTQAMDEADYYCQAFQSSTVVFGCGTKLTVLSGGGGSEVQLVESGGGLVQPGGSLKLSCAASGFTFNKYAMNWVRQAPGKGLEWVARIRSKYNNYATYYADSVKDRFTISRDDSKNTAYLQMNNLKTEDTAVYYCVRHGNFGNSYISYWAYWGQGTLVTVSSGGGGSGGGGSGGGGSQTVVTQEPSLTVSPGGTVTLTCGSSTGAVTSGNYPNWVQQKPGQAPRGLIGGTKFLAPGTPARFSGSLLGGKAALTLSGVQPEDEAEYYCVLWYSNRWVFGGGTKLTVL

SEQ ID NO: 241 - protein, 986 aa, Artificial Sequence
  Synthetic Polypeptide
  MISC_FEATURE: MU 5-H1 CC x I2C0-scFc Bispecific HLE molecule
QVQLQESGPGLVKPSETLSLTCTVSGDSISSGGYNWAWIRQHPGKCLEWIGYIYYSGSTYYNPSLKSRVTISVDTSKNQFSLKLSSVTAADTAVYYCAREKYSSRWTFFDYWGQGTLVTVSSGGGGSGGGGSGGGGSSYELTQPPSVSVSPGQTASITCSGDKLGDNYASWYQQKPGQSPVLVIYHDNKRPSGIPERFSGSNSGNTATLTISGTQAMDEADYYCQAFQSSTVVFGCGTKLTVLSGGGGSEVQLVESGGGLVQPGGSLKLSCAASGFTFNKYAMNWVRQAPGKGLEWVARIRSKYNNYATYYADSVKDRFTISRDDSKNTAYLQMNNLKTEDTAVYYCVRHGNFGNSYISYWAYWGQGTLVTVSSGGGGSGGGGSGGGGSQTVVTQEPSLTVSPGGTVTLTCGSSTGAVTSGNYPNWVQQKPGQAPRGLIGGTKFLAPGTPARFSGSLLGGKAALTLSGVQPEDEAEYYCVLWYSNRWVFGGGTKLTVLGGGGDKTHTCPPCPAPELLGGPSVFLFPPKPKDTLMISRTPEVTCVVVDVSHEDPEVKFNWYVDGVEVHNAKTKPCEEQYGSTYRCVSVLTVLHQDWLNGKEYKCKVSNKALPAPIEKTISKAKGQPREPQVYTLPPSREEMTKNQVSLTCLVKGFYPSDIAVEWESNGQPENNYKTTPPVLDSDGSFFLYSKLTVDKSRWQQGNVFSCSVMHEALHNHYTQKSLSLSPGKGGGGSGGGGSGGGGSGGGGSGGGGSGGGGSDKTHTCPPCPAPELLGGPSVFLFPPKPKDTLMISRTPEVTCVVVDVSHEDPEVKFNWYVDGVEVHNAKTKPCEEQYGSTYRCVSVLTVLHQDWLNGKEYKCKVSNKALPAPIEKTISKAKGQPREPQVYTLPPSREEMTKNQVSLTCLVKGFYPSDIAVEWESNGQPENNYKTTPPVLDSDGSFFLYSKLTVDKSRWQQGNVFSCSVMHEALHNHYTQKSLSLSPGK

SEQ ID NO: 242 - protein, 5 aa, Artificial Sequence
  Synthetic Polypeptide
  MISC_FEATURE: MU 4-H11 CC x I2C0-scFc VH CDR1
NFGMH

SEQ ID NO: 243 - protein, 17 aa, Artificial Sequence
  Synthetic Polypeptide
  MISC_FEATURE: MU 4-H11 CC x I2C0-scFc VH CDR2
VIWFDASKTYYAEAVKG

SEQ ID NO: 244 - protein, 12 aa, Artificial Sequence
  Synthetic Polypeptide
  MISC_FEATURE: MU 4-H11 CC x I2C0-scFc VH CDR3
ATYSTGWSYFDY

SEQ ID NO: 245 - protein, 11 aa, Artificial Sequence
  Synthetic Polypeptide
  MISC_FEATURE: MU 4-H11 CC x I2C0-scFc VL CDR1
SGDKLGDKYTS

SEQ ID NO: 246 - protein, 7 aa, Artificial Sequence
  Synthetic Polypeptide
  MISC_FEATURE: MU 4-H11 CC x I2C0-scFc VL CDR2
HDAKRPS

SEQ ID NO: 247 - protein, 10 aa, Artificial Sequence
  Synthetic Polypeptide
  MISC_FEATURE: MU 4-H11 CC x I2C0-scFc VL CDR3
QAYEASTAWV

SEQ ID NO: 248 - protein, 121 aa, Artificial Sequence
  Synthetic Polypeptide
  MISC_FEATURE: MU 4-H11 CC x I2C0-scFc VH
QVQLVESGGGVVQPGRSLRLSCAASGFTFSNFGMHWVRQAPGKCLEWVAVIWFDASKTYYAEAVKGRFTISRDTSMNTLYLQMNSLRAEDTAVYYCARATYSTGWSYFDYWGQGTLVTVSS

SEQ ID NO: 249 - protein, 107 aa, Artificial Sequence
  Synthetic Polypeptide
  MISC_FEATURE: MU 4-H11 CC x I2C0-scFc VL
SYELTQPPSVSVSPGQTASITCSGDKLGDKYTSWYQQKPGQSPVLVIYHDAKRPSGIPERFSGSNSGNTATLTISGTQAMDEADYYCQAYEASTAWVFGCGTKLTVL

SEQ ID NO: 250 - protein, 243 aa, Artificial Sequence
  Synthetic Polypeptide
  MISC_FEATURE: MU 4-H11 CC x I2C0-scFc scFv
QVQLVESGGGVVQPGRSLRLSCAASGFTFSNFGMHWVRQAPGKCLEWVAVIWFDASKTYYAEAVKGRFTISRDTSMNTLYLQMNSLRAEDTAVYYCARATYSTGWSYFDYWGQGTLVTVSSGGGGSGGGGSGGGGSSYELTQPPSVSVSPGQTASITCSGDKLGDKYTSWYQQKPGQSPVLVIYHDAKRPSGIPERFSGSNSGNTATLTISGTQAMDEADYYCQAYEASTAWVFGCGTKLTVL

SEQ ID NO: 251 - protein, 498 aa, Artificial Sequence
  Synthetic Polypeptide
  MISC_FEATURE: MU 4-H11 CC x I2C0-scFc Bispecific molecule
QVQLVESGGGVVQPGRSLRLSCAASGFTFSNFGMHWVRQAPGKCLEWVAVIWFDASKTYYAEAVKGRFTISRDTSMNTLYLQMNSLRAEDTAVYYCARATYSTGWSYFDYWGQGTLVTVSSGGGGSGGGGSGGGGSSYELTQPPSVSVSPGQTASITCSGDKLGDKYTSWYQQKPGQSPVLVIYHDAKRPSGIPERFSGSNSGNTATLTISGTQAMDEADYYCQAYEASTAWVFGCGTKLTVLSGGGGSEVQLVESGGGLVQPGGSLKLSCAASGFTFNKYAMNWVRQAPGKGLEWVARIRSKYNNYATYYADSVKDRFTISRDDSKNTAYLQMNNLKTEDTAVYYCVRHGNFGNSYISYWAYWGQGTLVTVSSGGGGSGGGGSGGGGSQTVVTQEPSLTVSPGGTVTLTCGSSTGAVTSGNYPNWVQQKPGQAPRGLIGGTKFLAPGTPARFSGSLLGGKAALTLSGVQPEDEAEYYCVLWYSNRWVFGGGTKLTVL

SEQ ID NO: 252 - protein, 986 aa, Artificial Sequence
  Synthetic Polypeptide
  MISC_FEATURE: MU 4-H11 CC x I2C0-scFc Bispecific HLE molecule
QVQLVESGGGVVQPGRSLRLSCAASGFTFSNFGMHWVRQAPGKCLEWVAVIWFDASKTYYAEAVKGRFTISRDTSMNTLYLQMNSLRAEDTAVYYCARATYSTGWSYFDYWGQGTLVTVSSGGGGSGGGGSGGGGSSYELTQPPSVSVSPGQTASITCSGDKLGDKYTSWYQQKPGQSPVLVIYHDAKRPSGIPERFSGSNSGNTATLTISGTQAMDEADYYCQAYEASTAWVFGCGTKLTVLSGGGGSEVQLVESGGGLVQPGGSLKLSCAASGFTFNKYAMNWVRQAPGKGLEWVARIRSKYNNYATYYADSVKDRFTISRDDSKNTAYLQMNNLKTEDTAVYYCVRHGNFGNSYISYWAYWGQGTLVTVSSGGGGSGGGGSGGGGSQTVVTQEPSLTVSPGGTVTLTCGSSTGAVTSGNYPNWVQQKPGQAPRGLIGGTKFLAPGTPARFSGSLLGGKAALTLSGVQPEDEAEYYCVLWYSNRWVFGGGTKLTVLGGGGDKTHTCPPCPAPELLGGPSVFLFPPKPKDTLMISRTPEVTCVVVDVSHEDPEVKFNWYVDGVEVHNAKTKPCEEQYGSTYRCVSVLTVLHQDWLNGKEYKCKVSNKALPAPIEKTISKAKGQPREPQVYTLPPSREEMTKNQVSLTCLVKGFYPSDIAVEWESNGQPENNYKTTPPVLDSDGSFFLYSKLTVDKSRWQQGNVFSCSVMHEALHNHYTQKSLSLSPGKGGGGSGGGGSGGGGSGGGGSGGGGSGGGGSDKTHTCPPCPAPELLGGPSVFLFPPKPKDTLMISRTPEVTCVVVDVSHEDPEVKFNWYVDGVEVHNAKTKPCEEQYGSTYRCVSVLTVLHQDWLNGKEYKCKVSNKALPAPIEKTISKAKGQPREPQVYTLPPSREEMTKNQVSLTCLVKGFYPSDIAVEWESNGQPENNYKTTPPVLDSDGSFFLYSKLTVDKSRWQQGNVFSCSVMHEALHNHYTQKSLSLSPGK

SEQ ID NO: 253 - protein, 5 aa, Artificial Sequence
  Synthetic Polypeptide
  MISC_FEATURE: MU 4-H2 CC x I2C0-scFc VH CDR1
NFGMH

SEQ ID NO: 254 - protein, 17 aa, Artificial Sequence
  Synthetic Polypeptide
  MISC_FEATURE: MU 4-H2 CC x I2C0-scFc VH CDR2
VIWFDASKTYYAESVKG

SEQ ID NO: 255 - protein, 12 aa, Artificial Sequence
  Synthetic Polypeptide
  MISC_FEATURE: MU 4-H2 CC x I2C0-scFc VH CDR3
ATYSTGWSYFDY

SEQ ID NO: 256 - protein, 11 aa, Artificial Sequence
  Synthetic Polypeptide
  MISC_FEATURE: MU 4-H2 CC x I2C0-scFc VL CDR1
SGDKLGDKYTS

SEQ ID NO: 257 - protein, 7 aa, Artificial Sequence
  Synthetic Polypeptide
  MISC_FEATURE: MU 4-H2 CC x I2C0-scFc VL CDR2
HDAKRPS

SEQ ID NO: 258 - protein, 10 aa, Artificial Sequence
  Synthetic Polypeptide
  MISC_FEATURE: MU 4-H2 CC x I2C0-scFc VL CDR3
QAWEASTAWV

SEQ ID NO: 259 - protein, 121 aa, Artificial Sequence
  Synthetic Polypeptide
  MISC_FEATURE: MU 4-H2 CC x I2C0-scFc VH
QVQLVESGGGVVQPGRSLRLSCAASGFTFSNFGMHWVRQAPGKCLEWVAVIWFDASKTYYAESVKGRFTISRDTSMNTLYLQMNSLRAEDTAVYYCARATYSTGWSYFDYWGQGTLVTVSS

SEQ ID NO: 260 - protein, 107 aa, Artificial Sequence
  Synthetic Polypeptide
  MISC_FEATURE: MU 4-H2 CC x I2C0-scFc VL
SYELTQPPSVSVSPGQTASITCSGDKLGDKYTSWYQQKPGQSPVLVIYHDAKRPSGIPERFSGSNSGNTATLTISGTQAMDEADYYCQAWEASTAWVFGCGTKLTVL

SEQ ID NO: 261 - protein, 243 aa, Artificial Sequence
  Synthetic Polypeptide
  MISC_FEATURE: MU 4-H2 CC x I2C0-scFc scFv
QVQLVESGGGVVQPGRSLRLSCAASGFTFSNFGMHWVRQAPGKCLEWVAVIWFDASKTYYAESVKGRFTISRDTSMNTLYLQMNSLRAEDTAVYYCARATYSTGWSYFDYWGQGTLVTVSSGGGGSGGGGSGGGGSSYELTQPPSVSVSPGQTASITCSGDKLGDKYTSWYQQKPGQSPVLVIYHDAKRPSGIPERFSGSNSGNTATLTISGTQAMDEADYYCQAWEASTAWVFGCGTKLTVL

SEQ ID NO: 262 - protein, 498 aa, Artificial Sequence
  Synthetic Polypeptide
  MISC_FEATURE: MU 4-H2 CC x I2C0-scFc Bispecific molecule
QVQLVESGGGVVQPGRSLRLSCAASGFTFSNFGMHWVRQAPGKCLEWVAVIWFDASKTYYAESVKGRFTISRDTSMNTLYLQMNSLRAEDTAVYYCARATYSTGWSYFDYWGQGTLVTVSSGGGGSGGGGSGGGGSSYELTQPPSVSVSPGQTASITCSGDKLGDKYTSWYQQKPGQSPVLVIYHDAKRPSGIPERFSGSNSGNTATLTISGTQAMDEADYYCQAWEASTAWVFGCGTKLTVLSGGGGSEVQLVESGGGLVQPGGSLKLSCAASGFTFNKYAMNWVRQAPGKGLEWVARIRSKYNNYATYYADSVKDRFTISRDDSKNTAYLQMNNLKTEDTAVYYCVRHGNFGNSYISYWAYWGQGTLVTVSSGGGGSGGGGSGGGGSQTVVTQEPSLTVSPGGTVTLTCGSSTGAVTSGNYPNWVQQKPGQAPRGLIGGTKFLAPGTPARFSGSLLGGKAALTLSGVQPEDEAEYYCVLWYSNRWVFGGGTKLTVL

SEQ ID NO: 263 - protein, 986 aa, Artificial Sequence
  Synthetic Polypeptide
  MISC_FEATURE: MU 4-H2 CC x I2C0-scFc Bispecific HLE molecule
QVQLVESGGGVVQPGRSLRLSCAASGFTFSNFGMHWVRQAPGKCLEWVAVIWFDASKTYYAESVKGRFTISRDTSMNTLYLQMNSLRAEDTAVYYCARATYSTGWSYFDYWGQGTLVTVSSGGGGSGGGGSGGGGSSYELTQPPSVSVSPGQTASITCSGDKLGDKYTSWYQQKPGQSPVLVIYHDAKRPSGIPERFSGSNSGNTATLTISGTQAMDEADYYCQAWEASTAWVFGCGTKLTVLSGGGGSEVQLVESGGGLVQPGGSLKLSCAASGFTFNKYAMNWVRQAPGKGLEWVARIRSKYNNYATYYADSVKDRFTISRDDSKNTAYLQMNNLKTEDTAVYYCVRHGNFGNSYISYWAYWGQGTLVTVSSGGGGSGGGGSGGGGSQTVVTQEPSLTVSPGGTVTLTCGSSTGAVTSGNYPNWVQQKPGQAPRGLIGGTKFLAPGTPARFSGSLLGGKAALTLSGVQPEDEAEYYCVLWYSNRWVFGGGTKLTVLGGGGDKTHTCPPCPAPELLGGPSVFLFPPKPKDTLMISRTPEVTCVVVDVSHEDPEVKFNWYVDGVEVHNAKTKPCEEQYGSTYRCVSVLTVLHQDWLNGKEYKCKVSNKALPAPIEKTISKAKGQPREPQVYTLPPSREEMTKNQVSLTCLVKGFYPSDIAVEWESNGQPENNYKTTPPVLDSDGSFFLYSKLTVDKSRWQQGNVFSCSVMHEALHNHYTQKSLSLSPGKGGGGSGGGGSGGGGSGGGGSGGGGSGGGGSDKTHTCPPCPAPELLGGPSVFLFPPKPKDTLMISRTPEVTCVVVDVSHEDPEVKFNWYVDGVEVHNAKTKPCEEQYGSTYRCVSVLTVLHQDWLNGKEYKCKVSNKALPAPIEKTISKAKGQPREPQVYTLPPSREEMTKNQVSLTCLVKGFYPSDIAVEWESNGQPENNYKTTPPVLDSDGSFFLYSKLTVDKSRWQQGNVFSCSVMHEALHNHYTQKSLSLSPGK

SEQ ID NO: 264 - protein, 5 aa, Artificial Sequence
  Synthetic Polypeptide
  MISC_FEATURE: MU 4-G4 CC x I2C0-scFc VH CDR1
NFGMH

SEQ ID NO: 265 - protein, 17 aa, Artificial Sequence
  Synthetic Polypeptide
  MISC_FEATURE: MU 4-G4 CC x I2C0-scFc VH CDR2
VIWFDASKTYYADAVKG

SEQ ID NO: 266 - protein, 12 aa, Artificial Sequence
  Synthetic Polypeptide
  MISC_FEATURE: MU 4-G4 CC x I2C0-scFc VH CDR3
ATYSTGWSYFDY

SEQ ID NO: 267 - protein, 11 aa, Artificial Sequence
  Synthetic Polypeptide
  MISC_FEATURE: MU 4-G4 CC x I2C0-scFc VL CDR1
SGDKLGDKYTS

SEQ ID NO: 268 - protein, 7 aa, Artificial Sequence
  Synthetic Polypeptide
  MISC_FEATURE: MU 4-G4 CC x I2C0-scFc VL CDR2
HDAKRPS

SEQ ID NO: 269 - protein, 10 aa, Artificial Sequence
  Synthetic Polypeptide
  MISC_FEATURE: MU 4-G4 CC x I2C0-scFc VL CDR3
QAWDASTAWV

SEQ ID NO: 270 - protein, 121 aa, Artificial Sequence
  Synthetic Polypeptide
  MISC_FEATURE: MU 4-G4 CC x I2C0-scFc VH
QVQLVESGGGVVQPGRSLRLSCAASGFTFSNFGMHWVRQAPGKCLEWVAVIWFDASKTYYADAVKGRFTISRDTSMNTLYLQMNSLRAEDTAVYYCARATYSTGWSYFDYWGQGTLVTVSS

SEQ ID NO: 271 - protein, 107 aa, Artificial Sequence; identical to SEQ ID NO: 73
  Synthetic Polypeptide
  MISC_FEATURE: MU 4-G4 CC x I2C0-scFc VL

SEQ ID NO: 272 - protein, 243 aa, Artificial Sequence
  Synthetic Polypeptide
  MISC_FEATURE: MU 4-G4 CC x I2C0-scFc scFv
QVQLVESGGGVVQPGRSLRLSCAASGFTFSNFGMHWVRQAPGKCLEWVAVIWFDASKTYYADAVKGRFTISRDTSMNTLYLQMNSLRAEDTAVYYCARATYSTGWSYFDYWGQGTLVTVSSGGGGSGGGGSGGGGSSYELTQPPSVSVSPGQTASITCSGDKLGDKYTSWYQQKPGQSPVLVIYHDAKRPSGIPERFSGSNSGNTATLTISGTQAMDEADYYCQAWDASTAWVFGCGTKLTVL

SEQ ID NO: 273 - protein, 498 aa, Artificial Sequence
  Synthetic Polypeptide
  MISC_FEATURE: MU 4-G4 CC x I2C0-scFc Bispecific molecule
QVQLVESGGGVVQPGRSLRLSCAASGFTFSNFGMHWVRQAPGKCLEWVAVIWFDASKTYYADAVKGRFTISRDTSMNTLYLQMNSLRAEDTAVYYCARATYSTGWSYFDYWGQGTLVTVSSGGGGSGGGGSGGGGSSYELTQPPSVSVSPGQTASITCSGDKLGDKYTSWYQQKPGQSPVLVIYHDAKRPSGIPERFSGSNSGNTATLTISGTQAMDEADYYCQAWDASTAWVFGCGTKLTVLSGGGGSEVQLVESGGGLVQPGGSLKLSCAASGFTFNKYAMNWVRQAPGKGLEWVARIRSKYNNYATYYADSVKDRFTISRDDSKNTAYLQMNNLKTEDTAVYYCVRHGNFGNSYISYWAYWGQGTLVTVSSGGGGSGGGGSGGGGSQTVVTQEPSLTVSPGGTVTLTCGSSTGAVTSGNYPNWVQQKPGQAPRGLIGGTKFLAPGTPARFSGSLLGGKAALTLSGVQPEDEAEYYCVLWYSNRWVFGGGTKLTVL

SEQ ID NO: 274 - protein, 986 aa, Artificial Sequence
  Synthetic Polypeptide
  MISC_FEATURE: MU 4-G4 CC x I2C0-scFc Bispecific HLE molecule
QVQLVESGGGVVQPGRSLRLSCAASGFTFSNFGMHWVRQAPGKCLEWVAVIWFDASKTYYADAVKGRFTISRDTSMNTLYLQMNSLRAEDTAVYYCARATYSTGWSYFDYWGQGTLVTVSSGGGGSGGGGSGGGGSSYELTQPPSVSVSPGQTASITCSGDKLGDKYTSWYQQKPGQSPVLVIYHDAKRPSGIPERFSGSNSGNTATLTISGTQAMDEADYYCQAWDASTAWVFGCGTKLTVLSGGGGSEVQLVESGGGLVQPGGSLKLSCAASGFTFNKYAMNWVRQAPGKGLEWVARIRSKYNNYATYYADSVKDRFTISRDDSKNTAYLQMNNLKTEDTAVYYCVRHGNFGNSYISYWAYWGQGTLVTVSSGGGGSGGGGSGGGGSQTVVTQEPSLTVSPGGTVTLTCGSSTGAVTSGNYPNWVQQKPGQAPRGLIGGTKFLAPGTPARFSGSLLGGKAALTLSGVQPEDEAEYYCVLWYSNRWVFGGGTKLTVLGGGGDKTHTCPPCPAPELLGGPSVFLFPPKPKDTLMISRTPEVTCVVVDVSHEDPEVKFNWYVDGVEVHNAKTKPCEEQYGSTYRCVSVLTVLHQDWLNGKEYKCKVSNKALPAPIEKTISKAKGQPREPQVYTLPPSREEMTKNQVSLTCLVKGFYPSDIAVEWESNGQPENNYKTTPPVLDSDGSFFLYSKLTVDKSRWQQGNVFSCSVMHEALHNHYTQKSLSLSPGKGGGGSGGGGSGGGGSGGGGSGGGGSGGGGSDKTHTCPPCPAPELLGGPSVFLFPPKPKDTLMISRTPEVTCVVVDVSHEDPEVKFNWYVDGVEVHNAKTKPCEEQYGSTYRCVSVLTVLHQDWLNGKEYKCKVSNKALPAPIEKTISKAKGQPREPQVYTLPPSREEMTKNQVSLTCLVKGFYPSDIAVEWESNGQPENNYKTTPPVLDSDGSFFLYSKLTVDKSRWQQGNVFSCSVMHEALHNHYTQKSLSLSPGK

SEQ ID NO: 275 - protein, 5 aa, Artificial Sequence
  Synthetic Polypeptide
  MISC_FEATURE: MU 4-F6 CC x I2C0-scFc VH CDR1
NFGMH

SEQ ID NO: 276 - protein, 17 aa, Artificial Sequence
  Synthetic Polypeptide
  MISC_FEATURE: MU 4-F6 CC x I2C0-scFc VH CDR2
VIWFDASKTYYASSVKG

SEQ ID NO: 277 - protein, 12 aa, Artificial Sequence
  Synthetic Polypeptide
  MISC_FEATURE: MU 4-F6 CC x I2C0-scFc VH CDR3
ATYSTGWSYFDY

SEQ ID NO: 278 - protein, 11 aa, Artificial Sequence
  Synthetic Polypeptide
  MISC_FEATURE: MU 4-F6 CC x I2C0-scFc VL CDR1
SGDKLGDKYTS

SEQ ID NO: 279 - protein, 7 aa, Artificial Sequence
  Synthetic Polypeptide
  MISC_FEATURE: MU 4-F6 CC x I2C0-scFc VL CDR2
HDAKRPS

SEQ ID NO: 280 - protein, 10 aa, Artificial Sequence
  Synthetic Polypeptide
  MISC_FEATURE: MU 4-F6 CC x I2C0-scFc VL CDR3
QAYSASTAWV

SEQ ID NO: 281 - protein, 121 aa, Artificial Sequence; identical to SEQ ID NO: 72
  Synthetic Polypeptide
  MISC_FEATURE: MU 4-F6 CC x I2C0-scFc VH

SEQ ID NO: 282 - protein, 107 aa, Artificial Sequence
  Synthetic Polypeptide
  MISC_FEATURE: MU 4-F6 CC x I2C0-scFc VL
SYELTQPPSVSVSPGQTASITCSGDKLGDKYTSWYQQKPGQSPVLVIYHDAKRPSGIPERFSGSNSGNTATLTISGTQAMDEADYYCQAYSASTAWVFGCGTKLTVL

SEQ ID NO: 283 - protein, 243 aa, Artificial Sequence
  Synthetic Polypeptide
  MISC_FEATURE: MU 4-F6 CC x I2C0-scFc scFv
QVQLVESGGGVVQPGRSLRLSCAASGFTFSNFGMHWVRQAPGKCLEWVAVIWFDASKTYYASSVKGRFTISRDTSMNTLYLQMNSLRAEDTAVYYCARATYSTGWSYFDYWGQGTLVTVSSGGGGSGGGGSGGGGSSYELTQPPSVSVSPGQTASITCSGDKLGDKYTSWYQQKPGQSPVLVIYHDAKRPSGIPERFSGSNSGNTATLTISGTQAMDEADYYCQAYSASTAWVFGCGTKLTVL

SEQ ID NO: 284 - protein, 498 aa, Artificial Sequence
  Synthetic Polypeptide
  MISC_FEATURE: MU 4-F6 CC x I2C0-scFc Bispecific molecule
QVQLVESGGGVVQPGRSLRLSCAASGFTFSNFGMHWVRQAPGKCLEWVAVIWFDASKTYYASSVKGRFTISRDTSMNTLYLQMNSLRAEDTAVYYCARATYSTGWSYFDYWGQGTLVTVSSGGGGSGGGGSGGGGSSYELTQPPSVSVSPGQTASITCSGDKLGDKYTSWYQQKPGQSPVLVIYHDAKRPSGIPERFSGSNSGNTATLTISGTQAMDEADYYCQAYSASTAWVFGCGTKLTVLSGGGGSEVQLVESGGGLVQPGGSLKLSCAASGFTFNKYAMNWVRQAPGKGLEWVARIRSKYNNYATYYADSVKDRFTISRDDSKNTAYLQMNNLKTEDTAVYYCVRHGNFGNSYISYWAYWGQGTLVTVSSGGGGSGGGGSGGGGSQTVVTQEPSLTVSPGGTVTLTCGSSTGAVTSGNYPNWVQQKPGQAPRGLIGGTKFLAPGTPARFSGSLLGGKAALTLSGVQPEDEAEYYCVLWYSNRWVFGGGTKLTVL

SEQ ID NO: 285 - protein, 986 aa, Artificial Sequence
  Synthetic Polypeptide
  MISC_FEATURE: MU 4-F6 CC x I2C0-scFc Bispecific HLE molecule
QVQLVESGGGVVQPGRSLRLSCAASGFTFSNFGMHWVRQAPGKCLEWVAVIWFDASKTYYASSVKGRFTISRDTSMNTLYLQMNSLRAEDTAVYYCARATYSTGWSYFDYWGQGTLVTVSSGGGGSGGGGSGGGGSSYELTQPPSVSVSPGQTASITCSGDKLGDKYTSWYQQKPGQSPVLVIYHDAKRPSGIPERFSGSNSGNTATLTISGTQAMDEADYYCQAYSASTAWVFGCGTKLTVLSGGGGSEVQLVESGGGLVQPGGSLKLSCAASGFTFNKYAMNWVRQAPGKGLEWVARIRSKYNNYATYYADSVKDRFTISRDDSKNTAYLQMNNLKTEDTAVYYCVRHGNFGNSYISYWAYWGQGTLVTVSSGGGGSGGGGSGGGGSQTVVTQEPSLTVSPGGTVTLTCGSSTGAVTSGNYPNWVQQKPGQAPRGLIGGTKFLAPGTPARFSGSLLGGKAALTLSGVQPEDEAEYYCVLWYSNRWVFGGGTKLTVLGGGGDKTHTCPPCPAPELLGGPSVFLFPPKPKDTLMISRTPEVTCVVVDVSHEDPEVKFNWYVDGVEVHNAKTKPCEEQYGSTYRCVSVLTVLHQDWLNGKEYKCKVSNKALPAPIEKTISKAKGQPREPQVYTLPPSREEMTKNQVSLTCLVKGFYPSDIAVEWESNGQPENNYKTTPPVLDSDGSFFLYSKLTVDKSRWQQGNVFSCSVMHEALHNHYTQKSLSLSPGKGGGGSGGGGSGGGGSGGGGSGGGGSGGGGSDKTHTCPPCPAPELLGGPSVFLFPPKPKDTLMISRTPEVTCVVVDVSHEDPEVKFNWYVDGVEVHNAKTKPCEEQYGSTYRCVSVLTVLHQDWLNGKEYKCKVSNKALPAPIEKTISKAKGQPREPQVYTLPPSREEMTKNQVSLTCLVKGFYPSDIAVEWESNGQPENNYKTTPPVLDSDGSFFLYSKLTVDKSRWQQGNVFSCSVMHEALHNHYTQKSLSLSPGK

SEQ ID NO: 286 - protein, 5 aa, Artificial Sequence
  Synthetic Polypeptide
  MISC_FEATURE: MU 4-E7 CC x I2C0-scFc VH CDR1
GYYWS

SEQ ID NO: 287 - protein, 16 aa, Artificial Sequence
  Synthetic Polypeptide
  MISC_FEATURE: MU 4-E7 CC x I2C0-scFc VH CDR2
DIDYSGSTKYNPSLKS

SEQ ID NO: 288 - protein, 12 aa, Artificial Sequence
  Synthetic Polypeptide
  MISC_FEATURE: MU 4-E7 CC x I2C0-scFc VH CDR3
KKYSTVWSYFDY

SEQ ID NO: 289 - protein, 11 aa, Artificial Sequence
  Synthetic Polypeptide
  MISC_FEATURE: MU 4-E7 CC x I2C0-scFc VL CDR1
SGDKLGEKYAS

SEQ ID NO: 290 - protein, 7 aa, Artificial Sequence
  Synthetic Polypeptide
  MISC_FEATURE: MU 4-E7 CC x I2C0-scFc VL CDR2
QDRKRPS

SEQ ID NO: 291 - protein, 9 aa, Artificial Sequence
  Synthetic Polypeptide
  MISC_FEATURE: MU 4-E7 CC x I2C0-scFc VL CDR3
QAWGSSAAV

SEQ ID NO: 292 - protein, 120 aa, Artificial Sequence
  Synthetic Polypeptide
  MISC_FEATURE: MU 4-E7 CC x I2C0-scFc VH
QVQLQQWGAGLLKPSETLSLTCAVYGGSFSGYYWSWIRQPPGKCLEWIGDIDYSGSTKYNPSLKSRVTISLDTSKNQFSLKLNSVTAADTAVYFCARKKYSTVWSYFDYWGQGTLVTVSS

SEQ ID NO: 293 - protein, 106 aa, Artificial Sequence
  Synthetic Polypeptide
  MISC_FEATURE: MU 4-E7 CC x I2C0-scFc VL
SYELTQPSSVSVSPGQTASITCSGDKLGEKYASWYQQKPGQSPVLIIYQDRKRPSGVPERFSGSNSGNTATLTISGTQAMDEADYYCQAWGSSAAVFGCGTKLTVL

SEQ ID NO: 294 - protein, 241 aa, Artificial Sequence
  Synthetic Polypeptide
  MISC_FEATURE: MU 4-E7 CC x I2C0-scFc scFv
QVQLQQWGAGLLKPSETLSLTCAVYGGSFSGYYWSWIRQPPGKCLEWIGDIDYSGSTKYNPSLKSRVTISLDTSKNQFSLKLNSVTAADTAVYFCARKKYSTVWSYFDYWGQGTLVTVSSGGGGSGGGGSGGGGSSYELTQPSSVSVSPGQTASITCSGDKLGEKYASWYQQKPGQSPVLIIYQDRKRPSGVPERFSGSNSGNTATLTISGTQAMDEADYYCQAWGSSAAVFGCGTKLTVL

SEQ ID NO: 295 - protein, 496 aa, Artificial Sequence
  Synthetic Polypeptide
  MISC_FEATURE: MU 4-E7 CC x I2C0-scFc Bispecific molecule
QVQLQQWGAGLLKPSETLSLTCAVYGGSFSGYYWSWIRQPPGKCLEWIGDIDYSGSTKYNPSLKSRVTISLDTSKNQFSLKLNSVTAADTAVYFCARKKYSTVWSYFDYWGQGTLVTVSSGGGGSGGGGSGGGGSSYELTQPSSVSVSPGQTASITCSGDKLGEKYASWYQQKPGQSPVLIIYQDRKRPSGVPERFSGSNSGNTATLTISGTQAMDEADYYCQAWGSSAAVFGCGTKLTVLSGGGGSEVQLVESGGGLVQPGGSLKLSCAASGFTFNKYAMNWVRQAPGKGLEWVARIRSKYNNYATYYADSVKDRFTISRDDSKNTAYLQMNNLKTEDTAVYYCVRHGNFGNSYISYWAYWGQGTLVTVSSGGGGSGGGGSGGGGSQTVVTQEPSLTVSPGGTVTLTCGSSTGAVTSGNYPNWVQQKPGQAPRGLIGGTKFLAPGTPARFSGSLLGGKAALTLSGVQPEDEAEYYCVLWYSNRWVFGGGTKLTVL

SEQ ID NO: 296 - protein, 984 aa, Artificial Sequence
  Synthetic Polypeptide
  MISC_FEATURE: MU 4-E7 CC x I2C0-scFc Bispecific HLE molecule
QVQLQQWGAGLLKPSETLSLTCAVYGGSFSGYYWSWIRQPPGKCLEWIGDIDYSGSTKYNPSLKSRVTISLDTSKNQFSLKLNSVTAADTAVYFCARKKYSTVWSYFDYWGQGTLVTVSSGGGGSGGGGSGGGGSSYELTQPSSVSVSPGQTASITCSGDKLGEKYASWYQQKPGQSPVLIIYQDRKRPSGVPERFSGSNSGNTATLTISGTQAMDEADYYCQAWGSSAAVFGCGTKLTVLSGGGGSEVQLVESGGGLVQPGGSLKLSCAASGFTFNKYAMNWVRQAPGKGLEWVARIRSKYNNYATYYADSVKDRFTISRDDSKNTAYLQMNNLKTEDTAVYYCVRHGNFGNSYISYWAYWGQGTLVTVSSGGGGSGGGGSGGGGSQTVVTQEPSLTVSPGGTVTLTCGSSTGAVTSGNYPNWVQQKPGQAPRGLIGGTKFLAPGTPARFSGSLLGGKAALTLSGVQPEDEAEYYCVLWYSNRWVFGGGTKLTVLGGGGDKTHTCPPCPAPELLGGPSVFLFPPKPKDTLMISRTPEVTCVVVDVSHEDPEVKFNWYVDGVEVHNAKTKPCEEQYGSTYRCVSVLTVLHQDWLNGKEYKCKVSNKALPAPIEKTISKAKGQPREPQVYTLPPSREEMTKNQVSLTCLVKGFYPSDIAVEWESNGQPENNYKTTPPVLDSDGSFFLYSKLTVDKSRWQQGNVFSCSVMHEALHNHYTQKSLSLSPGKGGGGSGGGGSGGGGSGGGGSGGGGSGGGGSDKTHTCPPCPAPELLGGPSVFLFPPKPKDTLMISRTPEVTCVVVDVSHEDPEVKFNWYVDGVEVHNAKTKPCEEQYGSTYRCVSVLTVLHQDWLNGKEYKCKVSNKALPAPIEKTISKAKGQPREPQVYTLPPSREEMTKNQVSLTCLVKGFYPSDIAVEWESNGQPENNYKTTPPVLDSDGSFFLYSKLTVDKSRWQQGNVFSCSVMHEALHNHYTQKSLSLSPGK

SEQ ID NO: 297 - protein, 5 aa, Artificial Sequence
  Synthetic Polypeptide
  MISC_FEATURE: MU 4-C11 CC x I2C0-scFc VH CDR1
SYGMH

SEQ ID NO: 298 - protein, 17 aa, Artificial Sequence
  Synthetic Polypeptide
  MISC_FEATURE: MU 4-C11 CC x I2C0-scFc VH CDR2
VISYDASNKYYASAVKG

SEQ ID NO: 299 - protein, 9 aa, Artificial Sequence
  Synthetic Polypeptide
  MISC_FEATURE: MU 4-C11 CC x I2C0-scFc VH CDR3
GAYTYGFDY

SEQ ID NO: 300 - protein, 11 aa, Artificial Sequence
  Synthetic Polypeptide
  MISC_FEATURE: MU 4-C11 CC x I2C0-scFc VL CDR1
RASQSVNRYLA

SEQ ID NO: 301 - protein, 7 aa, Artificial Sequence
  Synthetic Polypeptide
  MISC_FEATURE: MU 4-C11 CC x I2C0-scFc VL CDR2
GASNRAT

SEQ ID NO: 302 - protein, 9 aa, Artificial Sequence
  Synthetic Polypeptide
  MISC_FEATURE: MU 4-C11 CC x I2C0-scFc VL CDR3
HHYGSSIFA

SEQ ID NO: 303 - protein, 118 aa, Artificial Sequence
  Synthetic Polypeptide
  MISC_FEATURE: MU 4-C11 CC x I2C0-scFc VH
QVQLVESGGGVVQPGRSLRLSCAASGFTFSSYGMHWVRQAPGKCLEWVAVISYDASNKYYASAVKGRFTISRDNSKNTLYLQMNSLRAEDTAVYYCARGAYTYGFDYWGQGTLVTVSS

SEQ ID NO: 304 - protein, 107 aa, Artificial Sequence; identical to SEQ ID NO: 40
  Synthetic Polypeptide
  MISC_FEATURE: MU 4-C11 CC x I2C0-scFc VL

SEQ ID NO: 305 - protein, 240 aa, Artificial Sequence
  Synthetic Polypeptide
  MISC_FEATURE: MU 4-C11 CC x I2C0-scFc scFv
QVQLVESGGGVVQPGRSLRLSCAASGFTFSSYGMHWVRQAPGKCLEWVAVISYDASNKYYASAVKGRFTISRDNSKNTLYLQMNSLRAEDTAVYYCARGAYTYGFDYWGQGTLVTVSSGGGGSGGGGSGGGGSEIVLTQSPGTLSLSPGERATLSCRASQSVNRYLAWYQQKPGQAPRLLIYGASNRATGIPDRFTGSGSGTDFTLTISRLEPEDFAVYFCHHYGSSIFAFGCGTKVEIK

SEQ ID NO: 306 - protein, 495 aa, Artificial Sequence
  Synthetic Polypeptide
  MISC_FEATURE: MU 4-C11 CC x I2C0-scFc Bispecific molecule
QVQLVESGGGVVQPGRSLRLSCAASGFTFSSYGMHWVRQAPGKCLEWVAVISYDASNKYYASAVKGRFTISRDNSKNTLYLQMNSLRAEDTAVYYCARGAYTYGFDYWGQGTLVTVSSGGGGSGGGGSGGGGSEIVLTQSPGTLSLSPGERATLSCRASQSVNRYLAWYQQKPGQAPRLLIYGASNRATGIPDRFTGSGSGTDFTLTISRLEPEDFAVYFCHHYGSSIFAFGCGTKVEIKSGGGGSEVQLVESGGGLVQPGGSLKLSCAASGFTFNKYAMNWVRQAPGKGLEWVARIRSKYNNYATYYADSVKDRFTISRDDSKNTAYLQMNNLKTEDTAVYYCVRHGNFGNSYISYWAYWGQGTLVTVSSGGGGSGGGGSGGGGSQTVVTQEPSLTVSPGGTVTLTCGSSTGAVTSGNYPNWVQQKPGQAPRGLIGGTKFLAPGTPARFSGSLLGGKAALTLSGVQPEDEAEYYCVLWYSNRWVFGGGTKLTVL

SEQ ID NO: 307 - protein, 983 aa, Artificial Sequence
  Synthetic Polypeptide
  MISC_FEATURE: MU 4-C11 CC x I2C0-scFc Bispecific HLE molecule
QVQLVESGGGVVQPGRSLRLSCAASGFTFSSYGMHWVRQAPGKCLEWVAVISYDASNKYYASAVKGRFTISRDNSKNTLYLQMNSLRAEDTAVYYCARGAYTYGFDYWGQGTLVTVSSGGGGSGGGGSGGGGSEIVLTQSPGTLSLSPGERATLSCRASQSVNRYLAWYQQKPGQAPRLLIYGASNRATGIPDRFTGSGSGTDFTLTISRLEPEDFAVYFCHHYGSSIFAFGCGTKVEIKSGGGGSEVQLVESGGGLVQPGGSLKLSCAASGFTFNKYAMNWVRQAPGKGLEWVARIRSKYNNYATYYADSVKDRFTISRDDSKNTAYLQMNNLKTEDTAVYYCVRHGNFGNSYISYWAYWGQGTLVTVSSGGGGSGGGGSGGGGSQTVVTQEPSLTVSPGGTVTLTCGSSTGAVTSGNYPNWVQQKPGQAPRGLIGGTKFLAPGTPARFSGSLLGGKAALTLSGVQPEDEAEYYCVLWYSNRWVFGGGTKLTVLGGGGDKTHTCPPCPAPELLGGPSVFLFPPKPKDTLMISRTPEVTCVVVDVSHEDPEVKFNWYVDGVEVHNAKTKPCEEQYGSTYRCVSVLTVLHQDWLNGKEYKCKVSNKALPAPIEKTISKAKGQPREPQVYTLPPSREEMTKNQVSLTCLVKGFYPSDIAVEWESNGQPENNYKTTPPVLDSDGSFFLYSKLTVDKSRWQQGNVFSCSVMHEALHNHYTQKSLSLSPGKGGGGSGGGGSGGGGSGGGGSGGGGSGGGGSDKTHTCPPCPAPELLGGPSVFLFPPKPKDTLMISRTPEVTCVVVDVSHEDPEVKFNWYVDGVEVHNAKTKPCEEQYGSTYRCVSVLTVLHQDWLNGKEYKCKVSNKALPAPIEKTISKAKGQPREPQVYTLPPSREEMTKNQVSLTCLVKGFYPSDIAVEWESNGQPENNYKTTPPVLDSDGSFFLYSKLTVDKSRWQQGNVFSCSVMHEALHNHYTQKSLSLSPGK

SEQ ID NO: 308 - protein, 5 aa, Artificial Sequence
  Synthetic Polypeptide
  MISC_FEATURE: MU 4-C4 CC x I2C0-scFc VH CDR1
SYGMH

SEQ ID NO: 309 - protein, 17 aa, Artificial Sequence
  Synthetic Polypeptide
  MISC_FEATURE: MU 4-C4 CC x I2C0-scFc VH CDR2
VIWFDASNKYYAESVKG

SEQ ID NO: 310 - protein, 9 aa, Artificial Sequence
  Synthetic Polypeptide
  MISC_FEATURE: MU 4-C4 CC x I2C0-scFc VH CDR3
GAYTYGFDY

SEQ ID NO: 311 - protein, 11 aa, Artificial Sequence
  Synthetic Polypeptide
  MISC_FEATURE: MU 4-C4 CC x I2C0-scFc VL CDR1
RASQSVNRYLA

SEQ ID NO: 312 - protein, 7 aa, Artificial Sequence
  Synthetic Polypeptide
  MISC_FEATURE: MU 4-C4 CC x I2C0-scFc VL CDR2
GASNRAT

SEQ ID NO: 313 - protein, 9 aa, Artificial Sequence
  Synthetic Polypeptide
  MISC_FEATURE: MU 4-C4 CC x I2C0-scFc VL CDR3
HHYGSSIFA

SEQ ID NO: 314 - protein, 118 aa, Artificial Sequence
  Synthetic Polypeptide
  MISC_FEATURE: MU 4-C4 CC x I2C0-scFc VH
QVQLVESGGGVVQPGRSLRLSCAASGFTFSSYGMHWVRQAPGKCLEWVAVIWFDASNKYYAESVKGRFTISRDNSKNTLYLQMNSLRAEDTAVYYCARGAYTYGFDYWGQGTLVTVSS

SEQ ID NO: 315 - protein, 107 aa, Artificial Sequence; identical to SEQ ID NO: 40
  Synthetic Polypeptide
  MISC_FEATURE: MU 4-C4 CC x I2C0-scFc VL

SEQ ID NO: 316 - protein, 240 aa, Artificial Sequence
  Synthetic Polypeptide
  MISC_FEATURE: MU 4-C4 CC x I2C0-scFc scFv
QVQLVESGGGVVQPGRSLRLSCAASGFTFSSYGMHWVRQAPGKCLEWVAVIWFDASNKYYAESVKGRFTISRDNSKNTLYLQMNSLRAEDTAVYYCARGAYTYGFDYWGQGTLVTVSSGGGGSGGGGSGGGGSEIVLTQSPGTLSLSPGERATLSCRASQSVNRYLAWYQQKPGQAPRLLIYGASNRATGIPDRFTGSGSGTDFTLTISRLEPEDFAVYFCHHYGSSIFAFGCGTKVEIK

SEQ ID NO: 317 - protein, 495 aa, Artificial Sequence
  Synthetic Polypeptide
  MISC_FEATURE: MU 4-C4 CC x I2C0-scFc Bispecific molecule
QVQLVESGGGVVQPGRSLRLSCAASGFTFSSYGMHWVRQAPGKCLEWVAVIWFDASNKYYAESVKGRFTISRDNSKNTLYLQMNSLRAEDTAVYYCARGAYTYGFDYWGQGTLVTVSSGGGGSGGGGSGGGGSEIVLTQSPGTLSLSPGERATLSCRASQSVNRYLAWYQQKPGQAPRLLIYGASNRATGIPDRFTGSGSGTDFTLTISRLEPEDFAVYFCHHYGSSIFAFGCGTKVEIKSGGGGSEVQLVESGGGLVQPGGSLKLSCAASGFTFNKYAMNWVRQAPGKGLEWVARIRSKYNNYATYYADSVKDRFTISRDDSKNTAYLQMNNLKTEDTAVYYCVRHGNFGNSYISYWAYWGQGTLVTVSSGGGGSGGGGSGGGGSQTVVTQEPSLTVSPGGTVTLTCGSSTGAVTSGNYPNWVQQKPGQAPRGLIGGTKFLAPGTPARFSGSLLGGKAALTLSGVQPEDEAEYYCVLWYSNRWVFGGGTKLTVL

SEQ ID NO: 318 - protein, 983 aa, Artificial Sequence
  Synthetic Polypeptide
  MISC_FEATURE: MU 4-C4 CC x I2C0-scFc Bispecific HLE molecule
QVQLVESGGGVVQPGRSLRLSCAASGFTFSSYGMHWVRQAPGKCLEWVAVIWFDASNKYYAESVKGRFTISRDNSKNTLYLQMNSLRAEDTAVYYCARGAYTYGFDYWGQGTLVTVSSGGGGSGGGGSGGGGSEIVLTQSPGTLSLSPGERATLSCRASQSVNRYLAWYQQKPGQAPRLLIYGASNRATGIPDRFTGSGSGTDFTLTISRLEPEDFAVYFCHHYGSSIFAFGCGTKVEIKSGGGGSEVQLVESGGGLVQPGGSLKLSCAASGFTFNKYAMNWVRQAPGKGLEWVARIRSKYNNYATYYADSVKDRFTISRDDSKNTAYLQMNNLKTEDTAVYYCVRHGNFGNSYISYWAYWGQGTLVTVSSGGGGSGGGGSGGGGSQTVVTQEPSLTVSPGGTVTLTCGSSTGAVTSGNYPNWVQQKPGQAPRGLIGGTKFLAPGTPARFSGSLLGGKAALTLSGVQPEDEAEYYCVLWYSNRWVFGGGTKLTVLGGGGDKTHTCPPCPAPELLGGPSVFLFPPKPKDTLMISRTPEVTCVVVDVSHEDPEVKFNWYVDGVEVHNAKTKPCEEQYGSTYRCVSVLTVLHQDWLNGKEYKCKVSNKALPAPIEKTISKAKGQPREPQVYTLPPSREEMTKNQVSLTCLVKGFYPSDIAVEWESNGQPENNYKTTPPVLDSDGSFFLYSKLTVDKSRWQQGNVFSCSVMHEALHNHYTQKSLSLSPGKGGGGSGGGGSGGGGSGGGGSGGGGSGGGGSDKTHTCPPCPAPELLGGPSVFLFPPKPKDTLMISRTPEVTCVVVDVSHEDPEVKFNWYVDGVEVHNAKTKPCEEQYGSTYRCVSVLTVLHQDWLNGKEYKCKVSNKALPAPIEKTISKAKGQPREPQVYTLPPSREEMTKNQVSLTCLVKGFYPSDIAVEWESNGQPENNYKTTPPVLDSDGSFFLYSKLTVDKSRWQQGNVFSCSVMHEALHNHYTQKSLSLSPGK

SEQ ID NO: 319 - protein, 5 aa, Artificial Sequence
  Synthetic Polypeptide
  MISC_FEATURE: MU 4-C3 CC x I2C0-scFc VH CDR1
SYGMH

SEQ ID NO: 320 - protein, 17 aa, Artificial Sequence
  Synthetic Polypeptide
  MISC_FEATURE: MU 4-C3 CC x I2C0-scFc VH CDR2
VISYEGSNKYYAESVKG

SEQ ID NO: 321 - protein, 9 aa, Artificial Sequence
  Synthetic Polypeptide
  MISC_FEATURE: MU 4-C3 CC x I2C0-scFc VH CDR3
GAYTYGFDY

SEQ ID NO: 322 - protein, 11 aa, Artificial Sequence
  Synthetic Polypeptide
  MISC_FEATURE: MU 4-C3 CC x I2C0-scFc VL CDR1
RASQSVNRYLA

SEQ ID NO: 323 - protein, 7 aa, Artificial Sequence
  Synthetic Polypeptide
  MISC_FEATURE: MU 4-C3 CC x I2C0-scFc VL CDR2
GASNRAT

SEQ ID NO: 324 - protein, 9 aa, Artificial Sequence
  Synthetic Polypeptide
  MISC_FEATURE: MU 4-C3 CC x I2C0-scFc VL CDR3
HHYGSSIFA

SEQ ID NO: 325 - protein, 118 aa, Artificial Sequence
  Synthetic Polypeptide
  MISC_FEATURE: MU 4-C3 CC x I2C0-scFc VH
QVQLVESGGGVVQPGRSLRLSCAASGFTFSSYGMHWVRQAPGKCLEWVAVISYEGSNKYYAESVKGRFTISRDNSKNTLYLQMNSLRAEDTAVYYCARGAYTYGFDYWGQGTLVTVSS

SEQ ID NO: 326 - protein, 107 aa, Artificial Sequence; identical to SEQ ID NO: 40
  Synthetic Polypeptide
  MISC_FEATURE: MU 4-C3 CC x I2C0-scFc VL

SEQ ID NO: 327 - protein, 240 aa, Artificial Sequence
  Synthetic Polypeptide
  MISC_FEATURE: MU 4-C3 CC x I2C0-scFc
QVQLVESGGGVVQPGRSLRLSCAASGFTFSSYGMHWVRQAPGKCLEWVAVISYEGSNKYYAESVKGRFTISRDNSKNTLYLQMNSLRAEDTAVYYCARGAYTYGFDYWGQGTLVTVSSGGGGSGGGGSGGGGSEIVLTQSPGTLSLSPGERATLSCRASQSVNRYLAWYQQKPGQAPRLLIYGASNRATGIPDRFTGSGSGTDFTLTISRLEPEDFAVYFCHHYGSSIFAFGCGTKVEIK

SEQ ID NO: 328 - protein, 495 aa, Artificial Sequence
  Synthetic Polypeptide
  MISC_FEATURE: MU 4-C3 CC x I2C0-scFc Bispecific molecule
QVQLVESGGGVVQPGRSLRLSCAASGFTFSSYGMHWVRQAPGKCLEWVAVISYEGSNKYYAESVKGRFTISRDNSKNTLYLQMNSLRAEDTAVYYCARGAYTYGFDYWGQGTLVTVSSGGGGSGGGGSGGGGSEIVLTQSPGTLSLSPGERATLSCRASQSVNRYLAWYQQKPGQAPRLLIYGASNRATGIPDRFTGSGSGTDFTLTISRLEPEDFAVYFCHHYGSSIFAFGCGTKVEIKSGGGGSEVQLVESGGGLVQPGGSLKLSCAASGFTFNKYAMNWVRQAPGKGLEWVARIRSKYNNYATYYADSVKDRFTISRDDSKNTAYLQMNNLKTEDTAVYYCVRHGNFGNSYISYWAYWGQGTLVTVSSGGGGSGGGGSGGGGSQTVVTQEPSLTVSPGGTVTLTCGSSTGAVTSGNYPNWVQQKPGQAPRGLIGGTKFLAPGTPARFSGSLLGGKAALTLSGVQPEDEAEYYCVLWYSNRWVFGGGTKLTVL

SEQ ID NO: 329 - protein, 983 aa, Artificial Sequence
  Synthetic Polypeptide
  MISC_FEATURE: MU 4-C3 CC x I2C0-scFc Bispecific HLE molecule
QVQLVESGGGVVQPGRSLRLSCAASGFTFSSYGMHWVRQAPGKCLEWVAVISYEGSNKYYAESVKGRFTISRDNSKNTLYLQMNSLRAEDTAVYYCARGAYTYGFDYWGQGTLVTVSSGGGGSGGGGSGGGGSEIVLTQSPGTLSLSPGERATLSCRASQSVNRYLAWYQQKPGQAPRLLIYGASNRATGIPDRFTGSGSGTDFTLTISRLEPEDFAVYFCHHYGSSIFAFGCGTKVEIKSGGGGSEVQLVESGGGLVQPGGSLKLSCAASGFTFNKYAMNWVRQAPGKGLEWVARIRSKYNNYATYYADSVKDRFTISRDDSKNTAYLQMNNLKTEDTAVYYCVRHGNFGNSYISYWAYWGQGTLVTVSSGGGGSGGGGSGGGGSQTVVTQEPSLTVSPGGTVTLTCGSSTGAVTSGNYPNWVQQKPGQAPRGLIGGTKFLAPGTPARFSGSLLGGKAALTLSGVQPEDEAEYYCVLWYSNRWVFGGGTKLTVLGGGGDKTHTCPPCPAPELLGGPSVFLFPPKPKDTLMISRTPEVTCVVVDVSHEDPEVKFNWYVDGVEVHNAKTKPCEEQYGSTYRCVSVLTVLHQDWLNGKEYKCKVSNKALPAPIEKTISKAKGQPREPQVYTLPPSREEMTKNQVSLTCLVKGFYPSDIAVEWESNGQPENNYKTTPPVLDSDGSFFLYSKLTVDKSRWQQGNVFSCSVMHEALHNHYTQKSLSLSPGKGGGGSGGGGSGGGGSGGGGSGGGGSGGGGSDKTHTCPPCPAPELLGGPSVFLFPPKPKDTLMISRTPEVTCVVVDVSHEDPEVKFNWYVDGVEVHNAKTKPCEEQYGSTYRCVSVLTVLHQDWLNGKEYKCKVSNKALPAPIEKTISKAKGQPREPQVYTLPPSREEMTKNQVSLTCLVKGFYPSDIAVEWESNGQPENNYKTTPPVLDSDGSFFLYSKLTVDKSRWQQGNVFSCSVMHEALHNHYTQKSLSLSPGK

SEQ ID NO: 330 - protein, 5 aa, Artificial Sequence
  Synthetic Polypeptide
  MISC_FEATURE: MU 4-B10 CC x I2C0-scFc VH CDR1
NFGMH

SEQ ID NO: 331 - protein, 17 aa, Artificial Sequence
  Synthetic Polypeptide
  MISC_FEATURE: MU 4-B10 CC x I2C0-scFc VH CDR2
VIWFDASKTYYASSVKG

SEQ ID NO: 332 - protein, 12 aa, Artificial Sequence
  Synthetic Polypeptide
  MISC_FEATURE: MU 4-B10 CC x I2C0-scFc VH CDR3
ATYSTGWSYFDY

SEQ ID NO: 333 - protein, 11 aa, Artificial Sequence
  Synthetic Polypeptide
  MISC_FEATURE: MU 4-B10 CC x I2C0-scFc VL CDR1
SGDKLGDKYTS

SEQ ID NO: 334 - protein, 7 aa, Artificial Sequence
  Synthetic Polypeptide
  MISC_FEATURE: MU 4-B10 CC x I2C0-scFc VL CDR2
HDAKRPS

SEQ ID NO: 335 - protein, 10 aa, Artificial Sequence
  Synthetic Polypeptide
  MISC_FEATURE: MU 4-B10 CC x I2C0-scFc VL CDR3
QAWSASTAWV

SEQ ID NO: 336 - protein, 121 aa, Artificial Sequence; identical to SEQ ID NO: 72
  Synthetic Polypeptide
  MISC_FEATURE: MU 4-B10 CC x I2C0-scFc VH

SEQ ID NO: 337 - protein, 107 aa, Artificial Sequence
  Synthetic Polypeptide
  MISC_FEATURE: MU 4-B10 CC x I2C0-scFc VL
SYELTQPPSVSVSPGQTASITCSGDKLGDKYTSWYQQKPGQSPVLVIYHDAKRPSGIPERFSGSNSGNTATLTISGTQAMDEADYYCQAWSASTAWVFGCGTKLTVL

SEQ ID NO: 338 - protein, 243 aa, Artificial Sequence
  Synthetic Polypeptide
  MISC_FEATURE: MU 4-B10 CC x I2C0-scFc scFv
QVQLVESGGGVVQPGRSLRLSCAASGFTFSNFGMHWVRQAPGKCLEWVAVIWFDASKTYYASSVKGRFTISRDTSMNTLYLQMNSLRAEDTAVYYCARATYSTGWSYFDYWGQGTLVTVSSGGGGSGGGGSGGGGSSYELTQPPSVSVSPGQTASITCSGDKLGDKYTSWYQQKPGQSPVLVIYHDAKRPSGIPERFSGSNSGNTATLTISGTQAMDEADYYCQAWSASTAWVFGCGTKLTVL

SEQ ID NO: 339 - protein, 498 aa, Artificial Sequence
  Synthetic Polypeptide
  MISC_FEATURE: MU 4-B10 CC x I2C0-scFc Bispecific molecule
QVQLVESGGGVVQPGRSLRLSCAASGFTFSNFGMHWVRQAPGKCLEWVAVIWFDASKTYYASSVKGRFTISRDTSMNTLYLQMNSLRAEDTAVYYCARATYSTGWSYFDYWGQGTLVTVSSGGGGSGGGGSGGGGSSYELTQPPSVSVSPGQTASITCSGDKLGDKYTSWYQQKPGQSPVLVIYHDAKRPSGIPERFSGSNSGNTATLTISGTQAMDEADYYCQAWSASTAWVFGCGTKLTVLSGGGGSEVQLVESGGGLVQPGGSLKLSCAASGFTFNKYAMNWVRQAPGKGLEWVARIRSKYNNYATYYADSVKDRFTISRDDSKNTAYLQMNNLKTEDTAVYYCVRHGNFGNSYISYWAYWGQGTLVTVSSGGGGSGGGGSGGGGSQTVVTQEPSLTVSPGGTVTLTCGSSTGAVTSGNYPNWVQQKPGQAPRGLIGGTKFLAPGTPARFSGSLLGGKAALTLSGVQPEDEAEYYCVLWYSNRWVFGGGTKLTVL

SEQ ID NO: 340 - protein, 986 aa, Artificial Sequence
  Synthetic Polypeptide
  MISC_FEATURE: MU 4-B10 CC x I2C0-scFc Bispecific HLE molecule
QVQLVESGGGVVQPGRSLRLSCAASGFTFSNFGMHWVRQAPGKCLEWVAVIWFDASKTYYASSVKGRFTISRDTSMNTLYLQMNSLRAEDTAVYYCARATYSTGWSYFDYWGQGTLVTVSSGGGGSGGGGSGGGGSSYELTQPPSVSVSPGQTASITCSGDKLGDKYTSWYQQKPGQSPVLVIYHDAKRPSGIPERFSGSNSGNTATLTISGTQAMDEADYYCQAWSASTAWVFGCGTKLTVLSGGGGSEVQLVESGGGLVQPGGSLKLSCAASGFTFNKYAMNWVRQAPGKGLEWVARIRSKYNNYATYYADSVKDRFTISRDDSKNTAYLQMNNLKTEDTAVYYCVRHGNFGNSYISYWAYWGQGTLVTVSSGGGGSGGGGSGGGGSQTVVTQEPSLTVSPGGTVTLTCGSSTGAVTSGNYPNWVQQKPGQAPRGLIGGTKFLAPGTPARFSGSLLGGKAALTLSGVQPEDEAEYYCVLWYSNRWVFGGGTKLTVLGGGGDKTHTCPPCPAPELLGGPSVFLFPPKPKDTLMISRTPEVTCVVVDVSHEDPEVKFNWYVDGVEVHNAKTKPCEEQYGSTYRCVSVLTVLHQDWLNGKEYKCKVSNKALPAPIEKTISKAKGQPREPQVYTLPPSREEMTKNQVSLTCLVKGFYPSDIAVEWESNGQPENNYKTTPPVLDSDGSFFLYSKLTVDKSRWQQGNVFSCSVMHEALHNHYTQKSLSLSPGKGGGGSGGGGSGGGGSGGGGSGGGGSGGGGSDKTHTCPPCPAPELLGGPSVFLFPPKPKDTLMISRTPEVTCVVVDVSHEDPEVKFNWYVDGVEVHNAKTKPCEEQYGSTYRCVSVLTVLHQDWLNGKEYKCKVSNKALPAPIEKTISKAKGQPREPQVYTLPPSREEMTKNQVSLTCLVKGFYPSDIAVEWESNGQPENNYKTTPPVLDSDGSFFLYSKLTVDKSRWQQGNVFSCSVMHEALHNHYTQKSLSLSPGK

SEQ ID NO: 341 - protein, 5 aa, Artificial Sequence
  Synthetic Polypeptide
  MISC_FEATURE: MU 4-B6 CC x I2C0-scFc VH CDR1
SYGMH

SEQ ID NO: 342 - protein, 17 aa, Artificial Sequence
  Synthetic Polypeptide
  MISC_FEATURE: MU 4-B6 CC x I2C0-scFc VH CDR2
VISYDASNKYYASSVKG

SEQ ID NO: 343 - protein, 9 aa, Artificial Sequence
  Synthetic Polypeptide
  MISC_FEATURE: MU 4-B6 CC x I2C0-scFc VH CDR3
GAYTYGFDY

SEQ ID NO: 344 - protein, 11 aa, Artificial Sequence
  Synthetic Polypeptide
  MISC_FEATURE: MU 4-B6 CC x I2C0-scFc VL CDR1
RASQSVNRYLA

SEQ ID NO: 345 - protein, 7 aa, Artificial Sequence
  Synthetic Polypeptide
  MISC_FEATURE: MU 4-B6 CC x I2C0-scFc VL CDR2
GASNRAT

SEQ ID NO: 346 - protein, 9 aa, Artificial Sequence
  Synthetic Polypeptide
  MISC_FEATURE: MU 4-B6 CC x I2C0-scFc VL CDR3
HHYGSSIFA

SEQ ID NO: 347 - protein, 118 aa, Artificial Sequence
  Synthetic Polypeptide
  MISC_FEATURE: MU 4-B6 CC x I2C0-scFc VH
QVQLVESGGGVVQPGRSLRLSCAASGFTFSSYGMHWVRQAPGKCLEWVAVISYDASNKYYASSVKGRFTISRDNSKNTLYLQMNSLRAEDTAVYYCARGAYTYGFDYWGQGTLVTVSS

SEQ ID NO: 348 - protein, 107 aa, Artificial Sequence; identical to SEQ ID NO: 40
  Synthetic Polypeptide
  MISC_FEATURE: MU 4-B6 CC x I2C0-scFc VL

SEQ ID NO: 349 - protein, 240 aa, Artificial Sequence
  Synthetic Polypeptide
  MISC_FEATURE: MU 4-B6 CC x I2C0-scFc scFv
QVQLVESGGGVVQPGRSLRLSCAASGFTFSSYGMHWVRQAPGKCLEWVAVISYDASNKYYASSVKGRFTISRDNSKNTLYLQMNSLRAEDTAVYYCARGAYTYGFDYWGQGTLVTVSSGGGGSGGGGSGGGGSEIVLTQSPGTLSLSPGERATLSCRASQSVNRYLAWYQQKPGQAPRLLIYGASNRATGIPDRFTGSGSGTDFTLTISRLEPEDFAVYFCHHYGSSIFAFGCGTKVEIK

SEQ ID NO: 350 - protein, 495 aa, Artificial Sequence
  Synthetic Polypeptide
  MISC_FEATURE: MU 4-B6 CC x I2C0-scFc Bispecific molecule
QVQLVESGGGVVQPGRSLRLSCAASGFTFSSYGMHWVRQAPGKCLEWVAVISYDASNKYYASSVKGRFTISRDNSKNTLYLQMNSLRAEDTAVYYCARGAYTYGFDYWGQGTLVTVSSGGGGSGGGGSGGGGSEIVLTQSPGTLSLSPGERATLSCRASQSVNRYLAWYQQKPGQAPRLLIYGASNRATGIPDRFTGSGSGTDFTLTISRLEPEDFAVYFCHHYGSSIFAFGCGTKVEIKSGGGGSEVQLVESGGGLVQPGGSLKLSCAASGFTFNKYAMNWVRQAPGKGLEWVARIRSKYNNYATYYADSVKDRFTISRDDSKNTAYLQMNNLKTEDTAVYYCVRHGNFGNSYISYWAYWGQGTLVTVSSGGGGSGGGGSGGGGSQTVVTQEPSLTVSPGGTVTLTCGSSTGAVTSGNYPNWVQQKPGQAPRGLIGGTKFLAPGTPARFSGSLLGGKAALTLSGVQPEDEAEYYCVLWYSNRWVFGGGTKLTVL

SEQ ID NO: 351 - protein, 983 aa, Artificial Sequence
  Synthetic Polypeptide
  MISC_FEATURE: MU 4-B6 CC x I2C0-scFc Bispecific HLE molecule
QVQLVESGGGVVQPGRSLRLSCAASGFTFSSYGMHWVRQAPGKCLEWVAVISYDASNKYYASSVKGRFTISRDNSKNTLYLQMNSLRAEDTAVYYCARGAYTYGFDYWGQGTLVTVSSGGGGSGGGGSGGGGSEIVLTQSPGTLSLSPGERATLSCRASQSVNRYLAWYQQKPGQAPRLLIYGASNRATGIPDRFTGSGSGTDFTLTISRLEPEDFAVYFCHHYGSSIFAFGCGTKVEIKSGGGGSEVQLVESGGGLVQPGGSLKLSCAASGFTFNKYAMNWVRQAPGKGLEWVARIRSKYNNYATYYADSVKDRFTISRDDSKNTAYLQMNNLKTEDTAVYYCVRHGNFGNSYISYWAYWGQGTLVTVSSGGGGSGGGGSGGGGSQTVVTQEPSLTVSPGGTVTLTCGSSTGAVTSGNYPNWVQQKPGQAPRGLIGGTKFLAPGTPARFSGSLLGGKAALTLSGVQPEDEAEYYCVLWYSNRWVFGGGTKLTVLGGGGDKTHTCPPCPAPELLGGPSVFLFPPKPKDTLMISRTPEVTCVVVDVSHEDPEVKFNWYVDGVEVHNAKTKPCEEQYGSTYRCVSVLTVLHQDWLNGKEYKCKVSNKALPAPIEKTISKAKGQPREPQVYTLPPSREEMTKNQVSLTCLVKGFYPSDIAVEWESNGQPENNYKTTPPVLDSDGSFFLYSKLTVDKSRWQQGNVFSCSVMHEALHNHYTQKSLSLSPGKGGGGSGGGGSGGGGSGGGGSGGGGSGGGGSDKTHTCPPCPAPELLGGPSVFLFPPKPKDTLMISRTPEVTCVVVDVSHEDPEVKFNWYVDGVEVHNAKTKPCEEQYGSTYRCVSVLTVLHQDWLNGKEYKCKVSNKALPAPIEKTISKAKGQPREPQVYTLPPSREEMTKNQVSLTCLVKGFYPSDIAVEWESNGQPENNYKTTPPVLDSDGSFFLYSKLTVDKSRWQQGNVFSCSVMHEALHNHYTQKSLSLSPGK

SEQ ID NO: 352 - protein, 5 aa, Artificial Sequence
  Synthetic Polypeptide
  MISC_FEATURE: MU 4-B1 CC x I2C0-scFc VH CDR1
NFGMH

SEQ ID NO: 353 - protein, 17 aa, Artificial Sequence
  Synthetic Polypeptide
  MISC_FEATURE: MU 4-B1 CC x I2C0-scFc VH CDR2
VIWFDASKTYYAESVKG

SEQ ID NO: 354 - protein, 12 aa, Artificial Sequence
  Synthetic Polypeptide
  MISC_FEATURE: MU 4-B1 CC x I2C0-scFc VH CDR3
ATYSTGWSYFDY

SEQ ID NO: 355 - protein, 11 aa, Artificial Sequence
  Synthetic Polypeptide
  MISC_FEATURE: MU 4-B1 CC x I2C0-scFc VL CDR1
SGDKLGDKYTS

SEQ ID NO: 356 - protein, 7 aa, Artificial Sequence
  Synthetic Polypeptide
  MISC_FEATURE: MU 4-B1 CC x I2C0-scFc VL CDR2
HDAKRPS

SEQ ID NO: 357 - protein, 10 aa, Artificial Sequence
  Synthetic Polypeptide
  MISC_FEATURE: MU 4-B1 CC x I2C0-scFc VL CDR3
QAWSASTAWV

SEQ ID NO: 358 - protein, 121 aa, Artificial Sequence; identical to SEQ ID NO: 259
  Synthetic Polypeptide
  MISC_FEATURE: MU 4-B1 CC x I2C0-scFc VH

SEQ ID NO: 359 - protein, 107 aa, Artificial Sequence; identical to SEQ ID NO: 337
  Synthetic Polypeptide
  MISC_FEATURE: MU 4-B1 CC x I2C0-scFc VL

SEQ ID NO: 360 - protein, 243 aa, Artificial Sequence
  Synthetic Polypeptide
  MISC_FEATURE: MU 4-B1 CC x I2C0-scFc scFv
QVQLVESGGGVVQPGRSLRLSCAASGFTFSNFGMHWVRQAPGKCLEWVAVIWFDASKTYYAESVKGRFTISRDTSMNTLYLQMNSLRAEDTAVYYCARATYSTGWSYFDYWGQGTLVTVSSGGGGSGGGGSGGGGSSYELTQPPSVSVSPGQTASITCSGDKLGDKYTSWYQQKPGQSPVLVIYHDAKRPSGIPERFSGSNSGNTATLTISGTQAMDEADYYCQAWSASTAWVFGCGTKLTVL

SEQ ID NO: 361 - protein, 498 aa, Artificial Sequence
  Synthetic Polypeptide
  MISC_FEATURE: MU 4-B1 CC x I2C0-scFc Bispecific molecule
QVQLVESGGGVVQPGRSLRLSCAASGFTFSNFGMHWVRQAPGKCLEWVAVIWFDASKTYYAESVKGRFTISRDTSMNTLYLQMNSLRAEDTAVYYCARATYSTGWSYFDYWGQGTLVTVSSGGGGSGGGGSGGGGSSYELTQPPSVSVSPGQTASITCSGDKLGDKYTSWYQQKPGQSPVLVIYHDAKRPSGIPERFSGSNSGNTATLTISGTQAMDEADYYCQAWSASTAWVFGCGTKLTVLSGGGGSEVQLVESGGGLVQPGGSLKLSCAASGFTFNKYAMNWVRQAPGKGLEWVARIRSKYNNYATYYADSVKDRFTISRDDSKNTAYLQMNNLKTEDTAVYYCVRHGNFGNSYISYWAYWGQGTLVTVSSGGGGSGGGGSGGGGSQTVVTQEPSLTVSPGGTVTLTCGSSTGAVTSGNYPNWVQQKPGQAPRGLIGGTKFLAPGTPARFSGSLLGGKAALTLSGVQPEDEAEYYCVLWYSNRWVFGGGTKLTVL

SEQ ID NO: 362 - protein, 986 aa, Artificial Sequence
  Synthetic Polypeptide
  MISC_FEATURE: MU 4-B1 CC x I2C0-scFc Bispecific HLE molecule
QVQLVESGGGVVQPGRSLRLSCAASGFTFSNFGMHWVRQAPGKCLEWVAVIWFDASKTYYAESVKGRFTISRDTSMNTLYLQMNSLRAEDTAVYYCARATYSTGWSYFDYWGQGTLVTVSSGGGGSGGGGSGGGGSSYELTQPPSVSVSPGQTASITCSGDKLGDKYTSWYQQKPGQSPVLVIYHDAKRPSGIPERFSGSNSGNTATLTISGTQAMDEADYYCQAWSASTAWVFGCGTKLTVLSGGGGSEVQLVESGGGLVQPGGSLKLSCAASGFTFNKYAMNWVRQAPGKGLEWVARIRSKYNNYATYYADSVKDRFTISRDDSKNTAYLQMNNLKTEDTAVYYCVRHGNFGNSYISYWAYWGQGTLVTVSSGGGGSGGGGSGGGGSQTVVTQEPSLTVSPGGTVTLTCGSSTGAVTSGNYPNWVQQKPGQAPRGLIGGTKFLAPGTPARFSGSLLGGKAALTLSGVQPEDEAEYYCVLWYSNRWVFGGGTKLTVLGGGGDKTHTCPPCPAPELLGGPSVFLFPPKPKDTLMISRTPEVTCVVVDVSHEDPEVKFNWYVDGVEVHNAKTKPCEEQYGSTYRCVSVLTVLHQDWLNGKEYKCKVSNKALPAPIEKTISKAKGQPREPQVYTLPPSREEMTKNQVSLTCLVKGFYPSDIAVEWESNGQPENNYKTTPPVLDSDGSFFLYSKLTVDKSRWQQGNVFSCSVMHEALHNHYTQKSLSLSPGKGGGGSGGGGSGGGGSGGGGSGGGGSGGGGSDKTHTCPPCPAPELLGGPSVFLFPPKPKDTLMISRTPEVTCVVVDVSHEDPEVKFNWYVDGVEVHNAKTKPCEEQYGSTYRCVSVLTVLHQDWLNGKEYKCKVSNKALPAPIEKTISKAKGQPREPQVYTLPPSREEMTKNQVSLTCLVKGFYPSDIAVEWESNGQPENNYKTTPPVLDSDGSFFLYSKLTVDKSRWQQGNVFSCSVMHEALHNHYTQKSLSLSPGK

SEQ ID NO: 363 - protein, 5 aa, Artificial Sequence
  Synthetic Polypeptide
  MISC_FEATURE: MU 4-A8 CC x I2C0-scFc VH CDR1
NFGMH

SEQ ID NO: 364 - protein, 17 aa, Artificial Sequence
  Synthetic Polypeptide
  MISC_FEATURE: MU 4-A8 CC x I2C0-scFc VH CDR2
VIWFDASKTYYADAVKG

SEQ ID NO: 365 - protein, 12 aa, Artificial Sequence
  Synthetic Polypeptide
  MISC_FEATURE: MU 4-A8 CC x I2C0-scFc VH CDR3
ATYSTGWSYFDY

SEQ ID NO: 366 - protein, 11 aa, Artificial Sequence
  Synthetic Polypeptide
  MISC_FEATURE: MU 4-A8 CC x I2C0-scFc VL CDR1
SGDKLGDKYTS

SEQ ID NO: 367 - protein, 7 aa, Artificial Sequence
  Synthetic Polypeptide
  MISC_FEATURE: MU 4-A8 CC x I2C0-scFc VL CDR2
HDAKRPS

SEQ ID NO: 368 - protein, 10 aa, Artificial Sequence
  Synthetic Polypeptide
  MISC_FEATURE: MU 4-A8 CC x I2C0-scFc VL CDR3
QAWSASTAWV

SEQ ID NO: 369 - protein, 121 aa, Artificial Sequence; identical to SEQ ID NO: 270
  Synthetic Polypeptide
  MISC_FEATURE: MU 4-A8 CC x I2C0-scFc VH

SEQ ID NO: 370 - protein, 107 aa, Artificial Sequence; identical to SEQ ID NO: 337
  Synthetic Polypeptide
  MISC_FEATURE: MU 4-A8 CC x I2C0-scFc VL

SEQ ID NO: 371 - protein, 243 aa, Artificial Sequence
  Synthetic Polypeptide
  MISC_FEATURE: MU 4-A8 CC x I2C0-scFc scFv
QVQLVESGGGVVQPGRSLRLSCAASGFTFSNFGMHWVRQAPGKCLEWVAVIWFDASKTYYADAVKGRFTISRDTSMNTLYLQMNSLRAEDTAVYYCARATYSTGWSYFDYWGQGTLVTVSSGGGGSGGGGSGGGGSSYELTQPPSVSVSPGQTASITCSGDKLGDKYTSWYQQKPGQSPVLVIYHDAKRPSGIPERFSGSNSGNTATLTISGTQAMDEADYYCQAWSASTAWVFGCGTKLTVL

SEQ ID NO: 372 - protein, 498 aa, Artificial Sequence
  Synthetic Polypeptide
  MISC_FEATURE: MU 4-A8 CC x I2C0-scFc Bispecific molecule
QVQLVESGGGVVQPGRSLRLSCAASGFTFSNFGMHWVRQAPGKCLEWVAVIWFDASKTYYADAVKGRFTISRDTSMNTLYLQMNSLRAEDTAVYYCARATYSTGWSYFDYWGQGTLVTVSSGGGGSGGGGSGGGGSSYELTQPPSVSVSPGQTASITCSGDKLGDKYTSWYQQKPGQSPVLVIYHDAKRPSGIPERFSGSNSGNTATLTISGTQAMDEADYYCQAWSASTAWVFGCGTKLTVLSGGGGSEVQLVESGGGLVQPGGSLKLSCAASGFTFNKYAMNWVRQAPGKGLEWVARIRSKYNNYATYYADSVKDRFTISRDDSKNTAYLQMNNLKTEDTAVYYCVRHGNFGNSYISYWAYWGQGTLVTVSSGGGGSGGGGSGGGGSQTVVTQEPSLTVSPGGTVTLTCGSSTGAVTSGNYPNWVQQKPGQAPRGLIGGTKFLAPGTPARFSGSLLGGKAALTLSGVQPEDEAEYYCVLWYSNRWVFGGGTKLTVL

SEQ ID NO: 373 - protein, 986 aa, Artificial Sequence
  Synthetic Polypeptide
  MISC_FEATURE: MU 4-A8 CC x I2C0-scFc Bispecific HLE molecule
QVQLVESGGGVVQPGRSLRLSCAASGFTFSNFGMHWVRQAPGKCLEWVAVIWFDASKTYYADAVKGRFTISRDTSMNTLYLQMNSLRAEDTAVYYCARATYSTGWSYFDYWGQGTLVTVSSGGGGSGGGGSGGGGSSYELTQPPSVSVSPGQTASITCSGDKLGDKYTSWYQQKPGQSPVLVIYHDAKRPSGIPERFSGSNSGNTATLTISGTQAMDEADYYCQAWSASTAWVFGCGTKLTVLSGGGGSEVQLVESGGGLVQPGGSLKLSCAASGFTFNKYAMNWVRQAPGKGLEWVARIRSKYNNYATYYADSVKDRFTISRDDSKNTAYLQMNNLKTEDTAVYYCVRHGNFGNSYISYWAYWGQGTLVTVSSGGGGSGGGGSGGGGSQTVVTQEPSLTVSPGGTVTLTCGSSTGAVTSGNYPNWVQQKPGQAPRGLIGGTKFLAPGTPARFSGSLLGGKAALTLSGVQPEDEAEYYCVLWYSNRWVFGGGTKLTVLGGGGDKTHTCPPCPAPELLGGPSVFLFPPKPKDTLMISRTPEVTCVVVDVSHEDPEVKFNWYVDGVEVHNAKTKPCEEQYGSTYRCVSVLTVLHQDWLNGKEYKCKVSNKALPAPIEKTISKAKGQPREPQVYTLPPSREEMTKNQVSLTCLVKGFYPSDIAVEWESNGQPENNYKTTPPVLDSDGSFFLYSKLTVDKSRWQQGNVFSCSVMHEALHNHYTQKSLSLSPGKGGGGSGGGGSGGGGSGGGGSGGGGSGGGGSDKTHTCPPCPAPELLGGPSVFLFPPKPKDTLMISRTPEVTCVVVDVSHEDPEVKFNWYVDGVEVHNAKTKPCEEQYGSTYRCVSVLTVLHQDWLNGKEYKCKVSNKALPAPIEKTISKAKGQPREPQVYTLPPSREEMTKNQVSLTCLVKGFYPSDIAVEWESNGQPENNYKTTPPVLDSDGSFFLYSKLTVDKSRWQQGNVFSCSVMHEALHNHYTQKSLSLSPGK

SEQ ID NO: 374 - protein, 5 aa, Artificial Sequence
  Synthetic Polypeptide
  MISC_FEATURE: MU 3-C10 CC x I2C0-scFc VH CDR1
SYGMH

SEQ ID NO: 375 - protein, 17 aa, Artificial Sequence
  Synthetic Polypeptide
  MISC_FEATURE: MU 3-C10 CC x I2C0-scFc VH CDR2
VIWYSGSNKYYATSVKG

SEQ ID NO: 376 - protein, 9 aa, Artificial Sequence
  Synthetic Polypeptide
  MISC_FEATURE: MU 3-C10 CC x I2C0-scFc VH CDR3
GGYTYGFDY

SEQ ID NO: 377 - protein, 11 aa, Artificial Sequence
  Synthetic Polypeptide
  MISC_FEATURE: MU 3-C10 CC x I2C0-scFc VL CDR1
RASQSINRYLA

SEQ ID NO: 378 - protein, 7 aa, Artificial Sequence
  Synthetic Polypeptide
  MISC_FEATURE: MU 3-C10 CC x I2C0-scFc VL CDR2
TASNRAT

SEQ ID NO: 379 - protein, 9 aa, Artificial Sequence
  Synthetic Polypeptide
  MISC_FEATURE: MU 3-C10 CC x I2C0-scFc VL CDR3
HHYGSSIFT

SEQ ID NO: 380 - protein, 118 aa, Artificial Sequence
  Synthetic Polypeptide
  MISC_FEATURE: MU 3-C10 CC x I2C0-scFc VH
QVQLVESGGGVVKPGRSLRLSCAASGFTFSSYGMHWVRQAPGKCLEWVAVIWYSGSNKYYATSVKGRFTISRDNSKNTLYLQMNNLRAEDTAVYYCARGGYTYGFDYWGQGTLVTVSS

SEQ ID NO: 381 - protein, 107 aa, Artificial Sequence; identical to SEQ ID NO: 205
  Synthetic Polypeptide
  MISC_FEATURE: MU 3-C10 CC x I2C0-scFc VL

SEQ ID NO: 382 - protein, 240 aa, Artificial Sequence
  Synthetic Polypeptide
  MISC_FEATURE: MU 3-C10 CC x I2C0-scFc scFv
QVQLVESGGGVVKPGRSLRLSCAASGFTFSSYGMHWVRQAPGKCLEWVAVIWYSGSNKYYATSVKGRFTISRDNSKNTLYLQMNNLRAEDTAVYYCARGGYTYGFDYWGQGTLVTVSSGGGGSGGGGSGGGGSEIVLTQSPGTLSLSPGERATLSCRASQSINRYLAWYQQKPGQAPRLLIYTASNRATGIPDRFSGSGSGTDFTLTISRLEPEDFAVYYCHHYGSSIFTFGCGTKVEIK

SEQ ID NO: 383 - protein, 495 aa, Artificial Sequence
  Synthetic Polypeptide
  MISC_FEATURE: MU 3-C10 CC x I2C0-scFc Bispecific molecule
QVQLVESGGGVVKPGRSLRLSCAASGFTFSSYGMHWVRQAPGKCLEWVAVIWYSGSNKYYATSVKGRFTISRDNSKNTLYLQMNNLRAEDTAVYYCARGGYTYGFDYWGQGTLVTVSSGGGGSGGGGSGGGGSEIVLTQSPGTLSLSPGERATLSCRASQSINRYLAWYQQKPGQAPRLLIYTASNRATGIPDRFSGSGSGTDFTLTISRLEPEDFAVYYCHHYGSSIFTFGCGTKVEIKSGGGGSEVQLVESGGGLVQPGGSLKLSCAASGFTFNKYAMNWVRQAPGKGLEWVARIRSKYNNYATYYADSVKDRFTISRDDSKNTAYLQMNNLKTEDTAVYYCVRHGNFGNSYISYWAYWGQGTLVTVSSGGGGSGGGGSGGGGSQTVVTQEPSLTVSPGGTVTLTCGSSTGAVTSGNYPNWVQQKPGQAPRGLIGGTKFLAPGTPARFSGSLLGGKAALTLSGVQPEDEAEYYCVLWYSNRWVFGGGTKLTVL

SEQ ID NO: 384 - protein, 983 aa, Artificial Sequence
  Synthetic Polypeptide
  MISC_FEATURE: MU 3-C10 CC x I2C0-scFc Bispecific HLE molecule
QVQLVESGGGVVKPGRSLRLSCAASGFTFSSYGMHWVRQAPGKCLEWVAVIWYSGSNKYYATSVKGRFTISRDNSKNTLYLQMNNLRAEDTAVYYCARGGYTYGFDYWGQGTLVTVSSGGGGSGGGGSGGGGSEIVLTQSPGTLSLSPGERATLSCRASQSINRYLAWYQQKPGQAPRLLIYTASNRATGIPDRFSGSGSGTDFTLTISRLEPEDFAVYYCHHYGSSIFTFGCGTKVEIKSGGGGSEVQLVESGGGLVQPGGSLKLSCAASGFTFNKYAMNWVRQAPGKGLEWVARIRSKYNNYATYYADSVKDRFTISRDDSKNTAYLQMNNLKTEDTAVYYCVRHGNFGNSYISYWAYWGQGTLVTVSSGGGGSGGGGSGGGGSQTVVTQEPSLTVSPGGTVTLTCGSSTGAVTSGNYPNWVQQKPGQAPRGLIGGTKFLAPGTPARFSGSLLGGKAALTLSGVQPEDEAEYYCVLWYSNRWVFGGGTKLTVLGGGGDKTHTCPPCPAPELLGGPSVFLFPPKPKDTLMISRTPEVTCVVVDVSHEDPEVKFNWYVDGVEVHNAKTKPCEEQYGSTYRCVSVLTVLHQDWLNGKEYKCKVSNKALPAPIEKTISKAKGQPREPQVYTLPPSREEMTKNQVSLTCLVKGFYPSDIAVEWESNGQPENNYKTTPPVLDSDGSFFLYSKLTVDKSRWQQGNVFSCSVMHEALHNHYTQKSLSLSPGKGGGGSGGGGSGGGGSGGGGSGGGGSGGGGSDKTHTCPPCPAPELLGGPSVFLFPPKPKDTLMISRTPEVTCVVVDVSHEDPEVKFNWYVDGVEVHNAKTKPCEEQYGSTYRCVSVLTVLHQDWLNGKEYKCKVSNKALPAPIEKTISKAKGQPREPQVYTLPPSREEMTKNQVSLTCLVKGFYPSDIAVEWESNGQPENNYKTTPPVLDSDGSFFLYSKLTVDKSRWQQGNVFSCSVMHEALHNHYTQKSLSLSPGK

SEQ ID NO: 385 - protein, 5 aa, Artificial Sequence
  Synthetic Polypeptide
  MISC_FEATURE: MU 2-F7 CC x I2C0-scFc VH CDR1
SYGMH

SEQ ID NO: 386 - protein, 17 aa, Artificial Sequence
  Synthetic Polypeptide
  MISC_FEATURE: MU 2-F7 CC x I2C0-scFc VH CDR2
VIWFDASNKYYAESVKG

SEQ ID NO: 387 - protein, 9 aa, Artificial Sequence
  Synthetic Polypeptide
  MISC_FEATURE: MU 2-F7 CC x I2C0-scFc VH CDR3
GGYTYGFDY

SEQ ID NO: 388 - protein, 11 aa, Artificial Sequence
  Synthetic Polypeptide
  MISC_FEATURE: MU 2-F7 CC x I2C0-scFc VL CDR1
RASQSINRYLA

SEQ ID NO: 389 - protein, 7 aa, Artificial Sequence
  Synthetic Polypeptide
  MISC_FEATURE: MU 2-F7 CC x I2C0-scFc VL CDR2
TASNRAT

SEQ ID NO: 390 - protein, 9 aa, Artificial Sequence
  Synthetic Polypeptide
  MISC_FEATURE: MU 2-F7 CC x I2C0-scFc VL CDR3
HHYGSSIFT

SEQ ID NO: 391 - protein, 118 aa, Artificial Sequence
  Synthetic Polypeptide
  MISC_FEATURE: MU 2-F7 CC x I2C0-scFc VH
QVQLVESGGGLVKPGGSLRLSCAASGFTFSSYGMHWVRQAPGKCLEWVAVIWFDASNKYYAESVKGRFTISRDNSKNTLYLQMNNLRAEDTAVYYCARGGYTYGFDYWGQGTLVTVSS

SEQ ID NO: 392 - protein, 107 aa, Artificial Sequence; identical to SEQ ID NO: 205
  Synthetic Polypeptide
  MISC_FEATURE: MU 2-F7 CC x I2C0-scFc VL

SEQ ID NO: 393 - protein, 240 aa, Artificial Sequence
  Synthetic Polypeptide
  MISC_FEATURE: MU 2-F7 CC x I2C0-scFc scFv
QVQLVESGGGLVKPGGSLRLSCAASGFTFSSYGMHWVRQAPGKCLEWVAVIWFDASNKYYAESVKGRFTISRDNSKNTLYLQMNNLRAEDTAVYYCARGGYTYGFDYWGQGTLVTVSSGGGGSGGGGSGGGGSEIVLTQSPGTLSLSPGERATLSCRASQSINRYLAWYQQKPGQAPRLLIYTASNRATGIPDRFSGSGSGTDFTLTISRLEPEDFAVYYCHHYGSSIFTFGCGTKVEIK

SEQ ID NO: 394 - protein, 495 aa, Artificial Sequence
  Synthetic Polypeptide
  MISC_FEATURE: MU 2-F7 CC x I2C0-scFc Bispecific molecule
QVQLVESGGGLVKPGGSLRLSCAASGFTFSSYGMHWVRQAPGKCLEWVAVIWFDASNKYYAESVKGRFTISRDNSKNTLYLQMNNLRAEDTAVYYCARGGYTYGFDYWGQGTLVTVSSGGGGSGGGGSGGGGSEIVLTQSPGTLSLSPGERATLSCRASQSINRYLAWYQQKPGQAPRLLIYTASNRATGIPDRFSGSGSGTDFTLTISRLEPEDFAVYYCHHYGSSIFTFGCGTKVEIKSGGGGSEVQLVESGGGLVQPGGSLKLSCAASGFTFNKYAMNWVRQAPGKGLEWVARIRSKYNNYATYYADSVKDRFTISRDDSKNTAYLQMNNLKTEDTAVYYCVRHGNFGNSYISYWAYWGQGTLVTVSSGGGGSGGGGSGGGGSQTVVTQEPSLTVSPGGTVTLTCGSSTGAVTSGNYPNWVQQKPGQAPRGLIGGTKFLAPGTPARFSGSLLGGKAALTLSGVQPEDEAEYYCVLWYSNRWVFGGGTKLTVL

SEQ ID NO: 395 - protein, 983 aa, Artificial Sequence
  Synthetic Polypeptide
  MISC_FEATURE: MU 2-F7 CC x I2C0-scFc Bispecific HLE molecule
QVQLVESGGGLVKPGGSLRLSCAASGFTFSSYGMHWVRQAPGKCLEWVAVIWFDASNKYYAESVKGRFTISRDNSKNTLYLQMNNLRAEDTAVYYCARGGYTYGFDYWGQGTLVTVSSGGGGSGGGGSGGGGSEIVLTQSPGTLSLSPGERATLSCRASQSINRYLAWYQQKPGQAPRLLIYTASNRATGIPDRFSGSGSGTDFTLTISRLEPEDFAVYYCHHYGSSIFTFGCGTKVEIKSGGGGSEVQLVESGGGLVQPGGSLKLSCAASGFTFNKYAMNWVRQAPGKGLEWVARIRSKYNNYATYYADSVKDRFTISRDDSKNTAYLQMNNLKTEDTAVYYCVRHGNFGNSYISYWAYWGQGTLVTVSSGGGGSGGGGSGGGGSQTVVTQEPSLTVSPGGTVTLTCGSSTGAVTSGNYPNWVQQKPGQAPRGLIGGTKFLAPGTPARFSGSLLGGKAALTLSGVQPEDEAEYYCVLWYSNRWVFGGGTKLTVLGGGGDKTHTCPPCPAPELLGGPSVFLFPPKPKDTLMISRTPEVTCVVVDVSHEDPEVKFNWYVDGVEVHNAKTKPCEEQYGSTYRCVSVLTVLHQDWLNGKEYKCKVSNKALPAPIEKTISKAKGQPREPQVYTLPPSREEMTKNQVSLTCLVKGFYPSDIAVEWESNGQPENNYKTTPPVLDSDGSFFLYSKLTVDKSRWQQGNVFSCSVMHEALHNHYTQKSLSLSPGKGGGGSGGGGSGGGGSGGGGSGGGGSGGGGSDKTHTCPPCPAPELLGGPSVFLFPPKPKDTLMISRTPEVTCVVVDVSHEDPEVKFNWYVDGVEVHNAKTKPCEEQYGSTYRCVSVLTVLHQDWLNGKEYKCKVSNKALPAPIEKTISKAKGQPREPQVYTLPPSREEMTKNQVSLTCLVKGFYPSDIAVEWESNGQPENNYKTTPPVLDSDGSFFLYSKLTVDKSRWQQGNVFSCSVMHEALHNHYTQKSLSLSPGK

SEQ ID NO: 396 - protein, 5 aa, Artificial Sequence
  Synthetic Polypeptide
  MISC_FEATURE: MU 02-E7 CC x I2C0-scFc VH CDR1
SYGMH

SEQ ID NO: 397 - protein, 17 aa, Artificial Sequence
  Synthetic Polypeptide
  MISC_FEATURE: MU 02-E7 CC x I2C0-scFc VH CDR2
VIWYTGSNKYYAHSVKG

SEQ ID NO: 398 - protein, 9 aa, Artificial Sequence
  Synthetic Polypeptide
  MISC_FEATURE: MU 02-E7 CC x I2C0-scFc VH CDR3
GAYTYGFDY

SEQ ID NO: 399 - protein, 11 aa, Artificial Sequence
  Synthetic Polypeptide
  MISC_FEATURE: MU 02-E7 CC x I2C0-scFc VL CDR1
RASQSINRYLA

SEQ ID NO: 400 - protein, 7 aa, Artificial Sequence
  Synthetic Polypeptide
  MISC_FEATURE: MU 02-E7 CC x I2C0-scFc VL CDR2
TASNRAT

SEQ ID NO: 401 - protein, 9 aa, Artificial Sequence
  Synthetic Polypeptide
  MISC_FEATURE: MU 02-E7 CC x I2C0-scFc VL CDR3
HHYGSSIFT

SEQ ID NO: 402 - protein, 118 aa, Artificial Sequence
  Synthetic Polypeptide
  MISC_FEATURE: MU 02-E7 CC x I2C0-scFc VH
QVQLVESGGGVVQPGGSLRLSCAASGFTFSSYGMHWVRQAPGKCLEWVAVIWYTGSNKYYAHSVKGRFAISRDNSKNTLYLQMNNLRAEDTAVYYCARGAYTYGFDYWGQGTLVTVSS

SEQ ID NO: 403 - protein, 107 aa, Artificial Sequence; identical to SEQ ID NO: 205
  Synthetic Polypeptide
  MISC_FEATURE: MU 02-E7 CC x I2C0-scFc VL

SEQ ID NO: 404 - protein, 240 aa, Artificial Sequence
  Synthetic Polypeptide
  MISC_FEATURE: MU 02-E7 CC x I2C0-scFc scFv
QVQLVESGGGVVQPGGSLRLSCAASGFTFSSYGMHWVRQAPGKCLEWVAVIWYTGSNKYYAHSVKGRFAISRDNSKNTLYLQMNNLRAEDTAVYYCARGAYTYGFDYWGQGTLVTVSSGGGGSGGGGSGGGGSEIVLTQSPGTLSLSPGERATLSCRASQSINRYLAWYQQKPGQAPRLLIYTASNRATGIPDRFSGSGSGTDFTLTISRLEPEDFAVYYCHHYGSSIFTFGCGTKVEIK

SEQ ID NO: 405 - protein, 495 aa, Artificial Sequence
  Synthetic Polypeptide
  MISC_FEATURE: MU 02-E7 CC x I2C0-scFc Bispecific molecule
QVQLVESGGGVVQPGGSLRLSCAASGFTFSSYGMHWVRQAPGKCLEWVAVIWYTGSNKYYAHSVKGRFAISRDNSKNTLYLQMNNLRAEDTAVYYCARGAYTYGFDYWGQGTLVTVSSGGGGSGGGGSGGGGSEIVLTQSPGTLSLSPGERATLSCRASQSINRYLAWYQQKPGQAPRLLIYTASNRATGIPDRFSGSGSGTDFTLTISRLEPEDFAVYYCHHYGSSIFTFGCGTKVEIKSGGGGSEVQLVESGGGLVQPGGSLKLSCAASGFTFNKYAMNWVRQAPGKGLEWVARIRSKYNNYATYYADSVKDRFTISRDDSKNTAYLQMNNLKTEDTAVYYCVRHGNFGNSYISYWAYWGQGTLVTVSSGGGGSGGGGSGGGGSQTVVTQEPSLTVSPGGTVTLTCGSSTGAVTSGNYPNWVQQKPGQAPRGLIGGTKFLAPGTPARFSGSLLGGKAALTLSGVQPEDEAEYYCVLWYSNRWVFGGGTKLTVL

SEQ ID NO: 406 - protein, 983 aa, Artificial Sequence
  Synthetic Polypeptide
  MISC_FEATURE: MU 02-E7 CC x I2C0-scFc Bispecific HLE molecule
QVQLVESGGGVVQPGGSLRLSCAASGFTFSSYGMHWVRQAPGKCLEWVAVIWYTGSNKYYAHSVKGRFAISRDNSKNTLYLQMNNLRAEDTAVYYCARGAYTYGFDYWGQGTLVTVSSGGGGSGGGGSGGGGSEIVLTQSPGTLSLSPGERATLSCRASQSINRYLAWYQQKPGQAPRLLIYTASNRATGIPDRFSGSGSGTDFTLTISRLEPEDFAVYYCHHYGSSIFTFGCGTKVEIKSGGGGSEVQLVESGGGLVQPGGSLKLSCAASGFTFNKYAMNWVRQAPGKGLEWVARIRSKYNNYATYYADSVKDRFTISRDDSKNTAYLQMNNLKTEDTAVYYCVRHGNFGNSYISYWAYWGQGTLVTVSSGGGGSGGGGSGGGGSQTVVTQEPSLTVSPGGTVTLTCGSSTGAVTSGNYPNWVQQKPGQAPRGLIGGTKFLAPGTPARFSGSLLGGKAALTLSGVQPEDEAEYYCVLWYSNRWVFGGGTKLTVLGGGGDKTHTCPPCPAPELLGGPSVFLFPPKPKDTLMISRTPEVTCVVVDVSHEDPEVKFNWYVDGVEVHNAKTKPCEEQYGSTYRCVSVLTVLHQDWLNGKEYKCKVSNKALPAPIEKTISKAKGQPREPQVYTLPPSREEMTKNQVSLTCLVKGFYPSDIAVEWESNGQPENNYKTTPPVLDSDGSFFLYSKLTVDKSRWQQGNVFSCSVMHEALHNHYTQKSLSLSPGKGGGGSGGGGSGGGGSGGGGSGGGGSGGGGSDKTHTCPPCPAPELLGGPSVFLFPPKPKDTLMISRTPEVTCVVVDVSHEDPEVKFNWYVDGVEVHNAKTKPCEEQYGSTYRCVSVLTVLHQDWLNGKEYKCKVSNKALPAPIEKTISKAKGQPREPQVYTLPPSREEMTKNQVSLTCLVKGFYPSDIAVEWESNGQPENNYKTTPPVLDSDGSFFLYSKLTVDKSRWQQGNVFSCSVMHEALHNHYTQKSLSLSPGK

SEQ ID NO: 407 - protein, 5 aa, Artificial Sequence
  Synthetic Polypeptide
  MISC_FEATURE: MU 2-D11 CC x I2C0-scFc VH CDR1
NHGMH

SEQ ID NO: 408 - protein, 17 aa, Artificial Sequence
  Synthetic Polypeptide
  MISC_FEATURE: MU 2-D11 CC x I2C0-scFc VH CDR2
GIWSDASNKYYAEAVKG

SEQ ID NO: 409 - protein, 12 aa, Artificial Sequence
  Synthetic Polypeptide
  MISC_FEATURE: MU 2-D11 CC x I2C0-scFc VH CDR3
ATYTTGWSYFDY

SEQ ID NO: 410 - protein, 11 aa, Artificial Sequence
  Synthetic Polypeptide
  MISC_FEATURE: MU 2-D11 CC x I2C0-scFc VL CDR1
SGDKLGDKYTS

SEQ ID NO: 411 - protein, 7 aa, Artificial Sequence
  Synthetic Polypeptide
  MISC_FEATURE: MU 2-D11 CC x I2C0-scFc VL CDR2
HDRKRPS

SEQ ID NO: 412 - protein, 10 aa, Artificial Sequence
  Synthetic Polypeptide
  MISC_FEATURE: MU 2-D11 CC x I2C0-scFc VL CDR3
QAYDRSTAWV

SEQ ID NO: 413 - protein, 121 aa, Artificial Sequence
  Synthetic Polypeptide
  MISC_FEATURE: MU 2-D11 CC x I2C0-scFc VH
QVQLVESGGGVVQPGRSLRLSCAASGFTFSNHGMHWVRQAPGKCLEWVAGIWSDASNKYYAEAVKGRFTISRDTSKNTLYLQMNSLRAEDTAVYYCARATYTTGWSYFDYWGQGTLVTVSS

SEQ ID NO: 414 - protein, 107 aa, Artificial Sequence
  Synthetic Polypeptide
  MISC_FEATURE: MU 2-D11 CC x I2C0-scFc VL
SYELTQSPSVSVSPGQTASITCSGDKLGDKYTSWYQQKPGQSPVLVIYHDRKRPSGIPERFSGSNSGNTATLTISGTQAMDEADYYCQAYDRSTAWVFGCGTKLTVL

SEQ ID NO: 415 - protein, 243 aa, Artificial Sequence
  Synthetic Polypeptide
  MISC_FEATURE: MU 2-D11 CC x I2C0-scFc scFv
QVQLVESGGGVVQPGRSLRLSCAASGFTFSNHGMHWVRQAPGKCLEWVAGIWSDASNKYYAEAVKGRFTISRDTSKNTLYLQMNSLRAEDTAVYYCARATYTTGWSYFDYWGQGTLVTVSSGGGGSGGGGSGGGGSSYELTQSPSVSVSPGQTASITCSGDKLGDKYTSWYQQKPGQSPVLVIYHDRKRPSGIPERFSGSNSGNTATLTISGTQAMDEADYYCQAYDRSTAWVFGCGTKLTVL

SEQ ID NO: 416 - protein, 498 aa, Artificial Sequence
  Synthetic Polypeptide
  MISC_FEATURE: MU 2-D11 CC x I2C0-scFc Bispecific molecule
QVQLVESGGGVVQPGRSLRLSCAASGFTFSNHGMHWVRQAPGKCLEWVAGIWSDASNKYYAEAVKGRFTISRDTSKNTLYLQMNSLRAEDTAVYYCARATYTTGWSYFDYWGQGTLVTVSSGGGGSGGGGSGGGGSSYELTQSPSVSVSPGQTASITCSGDKLGDKYTSWYQQKPGQSPVLVIYHDRKRPSGIPERFSGSNSGNTATLTISGTQAMDEADYYCQAYDRSTAWVFGCGTKLTVLSGGGGSEVQLVESGGGLVQPGGSLKLSCAASGFTFNKYAMNWVRQAPGKGLEWVARIRSKYNNYATYYADSVKDRFTISRDDSKNTAYLQMNNLKTEDTAVYYCVRHGNFGNSYISYWAYWGQGTLVTVSSGGGGSGGGGSGGGGSQTVVTQEPSLTVSPGGTVTLTCGSSTGAVTSGNYPNWVQQKPGQAPRGLIGGTKFLAPGTPARFSGSLLGGKAALTLSGVQPEDEAEYYCVLWYSNRWVFGGGTKLTVL

SEQ ID NO: 417 - protein, 986 aa, Artificial Sequence
  Synthetic Polypeptide
  MISC_FEATURE: MU 2-D11 CC x I2C0-scFc Bispecific HLE molecule
QVQLVESGGGVVQPGRSLRLSCAASGFTFSNHGMHWVRQAPGKCLEWVAGIWSDASNKYYAEAVKGRFTISRDTSKNTLYLQMNSLRAEDTAVYYCARATYTTGWSYFDYWGQGTLVTVSSGGGGSGGGGSGGGGSSYELTQSPSVSVSPGQTASITCSGDKLGDKYTSWYQQKPGQSPVLVIYHDRKRPSGIPERFSGSNSGNTATLTISGTQAMDEADYYCQAYDRSTAWVFGCGTKLTVLSGGGGSEVQLVESGGGLVQPGGSLKLSCAASGFTFNKYAMNWVRQAPGKGLEWVARIRSKYNNYATYYADSVKDRFTISRDDSKNTAYLQMNNLKTEDTAVYYCVRHGNFGNSYISYWAYWGQGTLVTVSSGGGGSGGGGSGGGGSQTVVTQEPSLTVSPGGTVTLTCGSSTGAVTSGNYPNWVQQKPGQAPRGLIGGTKFLAPGTPARFSGSLLGGKAALTLSGVQPEDEAEYYCVLWYSNRWVFGGGTKLTVLGGGGDKTHTCPPCPAPELLGGPSVFLFPPKPKDTLMISRTPEVTCVVVDVSHEDPEVKFNWYVDGVEVHNAKTKPCEEQYGSTYRCVSVLTVLHQDWLNGKEYKCKVSNKALPAPIEKTISKAKGQPREPQVYTLPPSREEMTKNQVSLTCLVKGFYPSDIAVEWESNGQPENNYKTTPPVLDSDGSFFLYSKLTVDKSRWQQGNVFSCSVMHEALHNHYTQKSLSLSPGKGGGGSGGGGSGGGGSGGGGSGGGGSGGGGSDKTHTCPPCPAPELLGGPSVFLFPPKPKDTLMISRTPEVTCVVVDVSHEDPEVKFNWYVDGVEVHNAKTKPCEEQYGSTYRCVSVLTVLHQDWLNGKEYKCKVSNKALPAPIEKTISKAKGQPREPQVYTLPPSREEMTKNQVSLTCLVKGFYPSDIAVEWESNGQPENNYKTTPPVLDSDGSFFLYSKLTVDKSRWQQGNVFSCSVMHEALHNHYTQKSLSLSPGK

SEQ ID NO: 418 - protein, 5 aa, Artificial Sequence
  Synthetic Polypeptide
  MISC_FEATURE: MU 2-C2 CC x I2C0-scFc VH CDR1
NHGMH

SEQ ID NO: 419 - protein, 17 aa, Artificial Sequence
  Synthetic Polypeptide
  MISC_FEATURE: MU 2-C2 CC x I2C0-scFc VH CDR2
GIWSEGSNKYYADAVKG

SEQ ID NO: 420 - protein, 12 aa, Artificial Sequence
  Synthetic Polypeptide
  MISC_FEATURE: MU 2-C2 CC x I2C0-scFc VH CDR3
ATYTTGWSYFDY

SEQ ID NO: 421 - protein, 11 aa, Artificial Sequence
  Synthetic Polypeptide
  MISC_FEATURE: MU 2-C2 CC x I2C0-scFc VL CDR1
SGDKLGDKYAS

SEQ ID NO: 422 - protein, 7 aa, Artificial Sequence
  Synthetic Polypeptide
  MISC_FEATURE: MU 2-C2 CC x I2C0-scFc VL CDR2
QDAKRPS

SEQ ID NO: 423 - protein, 9 aa, Artificial Sequence
  Synthetic Polypeptide
  MISC_FEATURE: MU 2-C2 CC x I2C0-scFc VL CDR3
QAFHQSTWV

SEQ ID NO: 424 - protein, 121 aa, Artificial Sequence
  Synthetic Polypeptide
  MISC_FEATURE: MU 2-C2 CC x I2C0-scFc VH
QVQLVESGGGVVQPGRSLRLSCAASGFTFSNHGMHWVRQAPGKCLEWVAGIWSEGSNKYYADAVKGRFTISRDNSKNTLYLQMNSLRAEDTAVYYCARATYTTGWSYFDYWGQGTLVTVSS

SEQ ID NO: 425 - protein, 106 aa, Artificial Sequence
  Synthetic Polypeptide
  MISC_FEATURE: MU 2-C2 CC x I2C0-scFc VL
SYELTQPPSVSVSPGQTASITCSGDKLGDKYASWYQQKSGQSPVLVIYQDAKRPSGIPERFSGSNSGNTATLTISGTQAMDEADYYCQAFHQSTWVFGCGTQLTVL

SEQ ID NO: 426 - protein, 242 aa, Artificial Sequence
  Synthetic Polypeptide
  MISC_FEATURE: MU 2-C2 CC x I2C0-scFc scFv
QVQLVESGGGVVQPGRSLRLSCAASGFTFSNHGMHWVRQAPGKCLEWVAGIWSEGSNKYYADAVKGRFTISRDNSKNTLYLQMNSLRAEDTAVYYCARATYTTGWSYFDYWGQGTLVTVSSGGGGSGGGGSGGGGSSYELTQPPSVSVSPGQTASITCSGDKLGDKYASWYQQKSGQSPVLVIYQDAKRPSGIPERFSGSNSGNTATLTISGTQAMDEADYYCQAFHQSTWVFGCGTQLTVL

SEQ ID NO: 427 - protein, 497 aa, Artificial Sequence
  Synthetic Polypeptide
  MISC_FEATURE: MU 2-C2 CC x I2C0-scFc Bispecific molecule
QVQLVESGGGVVQPGRSLRLSCAASGFTFSNHGMHWVRQAPGKCLEWVAGIWSEGSNKYYADAVKGRFTISRDNSKNTLYLQMNSLRAEDTAVYYCARATYTTGWSYFDYWGQGTLVTVSSGGGGSGGGGSGGGGSSYELTQPPSVSVSPGQTASITCSGDKLGDKYASWYQQKSGQSPVLVIYQDAKRPSGIPERFSGSNSGNTATLTISGTQAMDEADYYCQAFHQSTWVFGCGTQLTVLSGGGGSEVQLVESGGGLVQPGGSLKLSCAASGFTFNKYAMNWVRQAPGKGLEWVARIRSKYNNYATYYADSVKDRFTISRDDSKNTAYLQMNNLKTEDTAVYYCVRHGNFGNSYISYWAYWGQGTLVTVSSGGGGSGGGGSGGGGSQTVVTQEPSLTVSPGGTVTLTCGSSTGAVTSGNYPNWVQQKPGQAPRGLIGGTKFLAPGTPARFSGSLLGGKAALTLSGVQPEDEAEYYCVLWYSNRWVFGGGTKLTVL

SEQ ID NO: 428 - protein, 985 aa, Artificial Sequence
  Synthetic Polypeptide
  MISC_FEATURE: MU 2-C2 CC x I2C0-scFc Bispecific HLE molecule
QVQLVESGGGVVQPGRSLRLSCAASGFTFSNHGMHWVRQAPGKCLEWVAGIWSEGSNKYYADAVKGRFTISRDNSKNTLYLQMNSLRAEDTAVYYCARATYTTGWSYFDYWGQGTLVTVSSGGGGSGGGGSGGGGSSYELTQPPSVSVSPGQTASITCSGDKLGDKYASWYQQKSGQSPVLVIYQDAKRPSGIPERFSGSNSGNTATLTISGTQAMDEADYYCQAFHQSTWVFGCGTQLTVLSGGGGSEVQLVESGGGLVQPGGSLKLSCAASGFTFNKYAMNWVRQAPGKGLEWVARIRSKYNNYATYYADSVKDRFTISRDDSKNTAYLQMNNLKTEDTAVYYCVRHGNFGNSYISYWAYWGQGTLVTVSSGGGGSGGGGSGGGGSQTVVTQEPSLTVSPGGTVTLTCGSSTGAVTSGNYPNWVQQKPGQAPRGLIGGTKFLAPGTPARFSGSLLGGKAALTLSGVQPEDEAEYYCVLWYSNRWVFGGGTKLTVLGGGGDKTHTCPPCPAPELLGGPSVFLFPPKPKDTLMISRTPEVTCVVVDVSHEDPEVKFNWYVDGVEVHNAKTKPCEEQYGSTYRCVSVLTVLHQDWLNGKEYKCKVSNKALPAPIEKTISKAKGQPREPQVYTLPPSREEMTKNQVSLTCLVKGFYPSDIAVEWESNGQPENNYKTTPPVLDSDGSFFLYSKLTVDKSRWQQGNVFSCSVMHEALHNHYTQKSLSLSPGKGGGGSGGGGSGGGGSGGGGSGGGGSGGGGSDKTHTCPPCPAPELLGGPSVFLFPPKPKDTLMISRTPEVTCVVVDVSHEDPEVKFNWYVDGVEVHNAKTKPCEEQYGSTYRCVSVLTVLHQDWLNGKEYKCKVSNKALPAPIEKTISKAKGQPREPQVYTLPPSREEMTKNQVSLTCLVKGFYPSDIAVEWESNGQPENNYKTTPPVLDSDGSFFLYSKLTVDKSRWQQGNVFSCSVMHEALHNHYTQKSLSLSPGK

SEQ ID NO: 429 - protein, 5 aa, Artificial Sequence
  Synthetic Polypeptide
  MISC_FEATURE: MU 2-A3 CC x I2C0-scFc VH CDR1
SFGMH

SEQ ID NO: 430 - protein, 17 aa, Artificial Sequence
  Synthetic Polypeptide
  MISC_FEATURE: MU 2-A3 CC x I2C0-scFc VH CDR2
VIWFDASNKYYAESVKG

SEQ ID NO: 431 - protein, 9 aa, Artificial Sequence
  Synthetic Polypeptide
  MISC_FEATURE: MU 2-A3 CC x I2C0-scFc VH CDR3
GGYTYGFDY

SEQ ID NO: 432 - protein, 11 aa, Artificial Sequence
  Synthetic Polypeptide
  MISC_FEATURE: MU 2-A3 CC x I2C0-scFc VL CDR1
RASQAINRYLA

SEQ ID NO: 433 - protein, 7 aa, Artificial Sequence
  Synthetic Polypeptide
  MISC_FEATURE: MU 2-A3 CC x I2C0-scFc VL CDR2
GASSRAT

SEQ ID NO: 434 - protein, 9 aa, Artificial Sequence
  Synthetic Polypeptide
  MISC_FEATURE: MU 2-A3 CC x I2C0-scFc VL CDR3
QHYGSSIFT

SEQ ID NO: 435 - protein, 118 aa, Artificial Sequence; identical to SEQ ID NO: 105
  Synthetic Polypeptide
  MISC_FEATURE: MU 2-A3 CC x I2C0-scFc VH

SEQ ID NO: 436 - protein, 107 aa, Artificial Sequence
  Synthetic Polypeptide
  MISC_FEATURE: MU 2-A3 CC x I2C0-scFc
EIVLTQSPGTLSVSPGERATLSCRASQAINRYLAWYQQKPGQAPRLLIYGASSRATGIPDRFSGSGSGTDFTLTISRLEPEDFAVYYCQHYGSSIFTFGCGTKVEIK

SEQ ID NO: 437 - protein, 240 aa, Artificial Sequence
  Synthetic Polypeptide
  MISC_FEATURE: MU 2-A3 CC x I2C0-scFc scFv VL
QVQLVESGGGVVQPGRSLRLSCAASGFTFSSFGMHWVRQAPGKCLEWVAVIWFDASNKYYAESVKGRFTISRDNSKNTLYLQMNSLRAEDTAVYYCARGGYTYGFDYWGQGTLVTVSSGGGGSGGGGSGGGGSEIVLTQSPGTLSVSPGERATLSCRASQAINRYLAWYQQKPGQAPRLLIYGASSRATGIPDRFSGSGSGTDFTLTISRLEPEDFAVYYCQHYGSSIFTFGCGTKVEIK

SEQ ID NO: 438 - protein, 495 aa, Artificial Sequence
  Synthetic Polypeptide
  MISC_FEATURE: MU 2-A3 CC x I2C0-scFc Bispecific molecule
QVQLVESGGGVVQPGRSLRLSCAASGFTFSSFGMHWVRQAPGKCLEWVAVIWFDASNKYYAESVKGRFTISRDNSKNTLYLQMNSLRAEDTAVYYCARGGYTYGFDYWGQGTLVTVSSGGGGSGGGGSGGGGSEIVLTQSPGTLSVSPGERATLSCRASQAINRYLAWYQQKPGQAPRLLIYGASSRATGIPDRFSGSGSGTDFTLTISRLEPEDFAVYYCQHYGSSIFTFGCGTKVEIKSGGGGSEVQLVESGGGLVQPGGSLKLSCAASGFTFNKYAMNWVRQAPGKGLEWVARIRSKYNNYATYYADSVKDRFTISRDDSKNTAYLQMNNLKTEDTAVYYCVRHGNFGNSYISYWAYWGQGTLVTVSSGGGGSGGGGSGGGGSQTVVTQEPSLTVSPGGTVTLTCGSSTGAVTSGNYPNWVQQKPGQAPRGLIGGTKFLAPGTPARFSGSLLGGKAALTLSGVQPEDEAEYYCVLWYSNRWVFGGGTKLTVL

SEQ ID NO: 439 - protein, 983 aa, Artificial Sequence
  Synthetic Polypeptide
  MISC_FEATURE: MU 2-A3 CC x I2C0-scFc Bispecific HLE molecule
QVQLVESGGGVVQPGRSLRLSCAASGFTFSSFGMHWVRQAPGKCLEWVAVIWFDASNKYYAESVKGRFTISRDNSKNTLYLQMNSLRAEDTAVYYCARGGYTYGFDYWGQGTLVTVSSGGGGSGGGGSGGGGSEIVLTQSPGTLSVSPGERATLSCRASQAINRYLAWYQQKPGQAPRLLIYGASSRATGIPDRFSGSGSGTDFTLTISRLEPEDFAVYYCQHYGSSIFTFGCGTKVEIKSGGGGSEVQLVESGGGLVQPGGSLKLSCAASGFTFNKYAMNWVRQAPGKGLEWVARIRSKYNNYATYYADSVKDRFTISRDDSKNTAYLQMNNLKTEDTAVYYCVRHGNFGNSYISYWAYWGQGTLVTVSSGGGGSGGGGSGGGGSQTVVTQEPSLTVSPGGTVTLTCGSSTGAVTSGNYPNWVQQKPGQAPRGLIGGTKFLAPGTPARFSGSLLGGKAALTLSGVQPEDEAEYYCVLWYSNRWVFGGGTKLTVLGGGGDKTHTCPPCPAPELLGGPSVFLFPPKPKDTLMISRTPEVTCVVVDVSHEDPEVKFNWYVDGVEVHNAKTKPCEEQYGSTYRCVSVLTVLHQDWLNGKEYKCKVSNKALPAPIEKTISKAKGQPREPQVYTLPPSREEMTKNQVSLTCLVKGFYPSDIAVEWESNGQPENNYKTTPPVLDSDGSFFLYSKLTVDKSRWQQGNVFSCSVMHEALHNHYTQKSLSLSPGKGGGGSGGGGSGGGGSGGGGSGGGGSGGGGSDKTHTCPPCPAPELLGGPSVFLFPPKPKDTLMISRTPEVTCVVVDVSHEDPEVKFNWYVDGVEVHNAKTKPCEEQYGSTYRCVSVLTVLHQDWLNGKEYKCKVSNKALPAPIEKTISKAKGQPREPQVYTLPPSREEMTKNQVSLTCLVKGFYPSDIAVEWESNGQPENNYKTTPPVLDSDGSFFLYSKLTVDKSRWQQGNVFSCSVMHEALHNHYTQKSLSLSPGK

SEQ ID NO: 440 - protein, 5 aa, Artificial Sequence
  Synthetic Polypeptide
  MISC_FEATURE: MU 1-H2 CC x I2C0-scFc VH CDR1
SYGMH

SEQ ID NO: 441 - protein, 17 aa, Artificial Sequence
  Synthetic Polypeptide
  MISC_FEATURE: MU 1-H2 CC x I2C0-scFc VH CDR2
VIWYDASNKYYATSVKG

SEQ ID NO: 442 - protein, 9 aa, Artificial Sequence
  Synthetic Polypeptide
  MISC_FEATURE: MU 1-H2 CC x I2C0-scFc VH CDR3
GGYTYGFDY

SEQ ID NO: 443 - protein, 11 aa, Artificial Sequence
  Synthetic Polypeptide
  MISC_FEATURE: MU 1-H2 CC x I2C0-scFc VL CDR1
RASQSINRYLA

SEQ ID NO: 444 - protein, 7 aa, Artificial Sequence
  Synthetic Polypeptide
  MISC_FEATURE: MU 1-H2 CC x I2C0-scFc VL CDR2
TASNRAT

SEQ ID NO: 445 - protein, 9 aa, Artificial Sequence
  Synthetic Polypeptide
  MISC_FEATURE: MU 1-H2 CC x I2C0-scFc VL CDR3
HHYGSSIFT

SEQ ID NO: 446 - protein, 118 aa, Artificial Sequence
  Synthetic Polypeptide
  MISC_FEATURE: MU 1-H2 CC x I2C0-scFc VH
QVQLVESGGGLVKPGGSLRLSCAASGFTFSSYGMHWVRQAPGKCLEWVAVIWYDASNKYYATSVKGRFTISRDNSKNTLYLQMNNLRAEDTAVYYCARGGYTYGFDYWGQGTLVTVSS

SEQ ID NO: 447 - protein, 107 aa, Artificial Sequence; identical to SEQ ID NO: 205
  Synthetic Polypeptide
  MISC_FEATURE: MU 1-H2 CC x I2C0-scFc VL

SEQ ID NO: 448 - protein, 240 aa, Artificial Sequence
  Synthetic Polypeptide
  MISC_FEATURE: MU 1-H2 CC x I2C0-scFc scFv
QVQLVESGGGLVKPGGSLRLSCAASGFTFSSYGMHWVRQAPGKCLEWVAVIWYDASNKYYATSVKGRFTISRDNSKNTLYLQMNNLRAEDTAVYYCARGGYTYGFDYWGQGTLVTVSSGGGGSGGGGSGGGGSEIVLTQSPGTLSLSPGERATLSCRASQSINRYLAWYQQKPGQAPRLLIYTASNRATGIPDRFSGSGSGTDFTLTISRLEPEDFAVYYCHHYGSSIFTFGCGTKVEIK

SEQ ID NO: 449 - protein, 495 aa, Artificial Sequence
  Synthetic Polypeptide
  MISC_FEATURE: MU 1-H2 CC x I2C0-scFc Bispecific molecule
QVQLVESGGGLVKPGGSLRLSCAASGFTFSSYGMHWVRQAPGKCLEWVAVIWYDASNKYYATSVKGRFTISRDNSKNTLYLQMNNLRAEDTAVYYCARGGYTYGFDYWGQGTLVTVSSGGGGSGGGGSGGGGSEIVLTQSPGTLSLSPGERATLSCRASQSINRYLAWYQQKPGQAPRLLIYTASNRATGIPDRFSGSGSGTDFTLTISRLEPEDFAVYYCHHYGSSIFTFGCGTKVEIKSGGGGSEVQLVESGGGLVQPGGSLKLSCAASGFTFNKYAMNWVRQAPGKGLEWVARIRSKYNNYATYYADSVKDRFTISRDDSKNTAYLQMNNLKTEDTAVYYCVRHGNFGNSYISYWAYWGQGTLVTVSSGGGGSGGGGSGGGGSQTVVTQEPSLTVSPGGTVTLTCGSSTGAVTSGNYPNWVQQKPGQAPRGLIGGTKFLAPGTPARFSGSLLGGKAALTLSGVQPEDEAEYYCVLWYSNRWVFGGGTKLTVL

SEQ ID NO: 450 - protein, 983 aa, Artificial Sequence
  Synthetic Polypeptide
  MISC_FEATURE: MU 1-H2 CC x I2C0-scFc Bispecific HLE molecule
QVQLVESGGGLVKPGGSLRLSCAASGFTFSSYGMHWVRQAPGKCLEWVAVIWYDASNKYYATSVKGRFTISRDNSKNTLYLQMNNLRAEDTAVYYCARGGYTYGFDYWGQGTLVTVSSGGGGSGGGGSGGGGSEIVLTQSPGTLSLSPGERATLSCRASQSINRYLAWYQQKPGQAPRLLIYTASNRATGIPDRFSGSGSGTDFTLTISRLEPEDFAVYYCHHYGSSIFTFGCGTKVEIKSGGGGSEVQLVESGGGLVQPGGSLKLSCAASGFTFNKYAMNWVRQAPGKGLEWVARIRSKYNNYATYYADSVKDRFTISRDDSKNTAYLQMNNLKTEDTAVYYCVRHGNFGNSYISYWAYWGQGTLVTVSSGGGGSGGGGSGGGGSQTVVTQEPSLTVSPGGTVTLTCGSSTGAVTSGNYPNWVQQKPGQAPRGLIGGTKFLAPGTPARFSGSLLGGKAALTLSGVQPEDEAEYYCVLWYSNRWVFGGGTKLTVLGGGGDKTHTCPPCPAPELLGGPSVFLFPPKPKDTLMISRTPEVTCVVVDVSHEDPEVKFNWYVDGVEVHNAKTKPCEEQYGSTYRCVSVLTVLHQDWLNGKEYKCKVSNKALPAPIEKTISKAKGQPREPQVYTLPPSREEMTKNQVSLTCLVKGFYPSDIAVEWESNGQPENNYKTTPPVLDSDGSFFLYSKLTVDKSRWQQGNVFSCSVMHEALHNHYTQKSLSLSPGKGGGGSGGGGSGGGGSGGGGSGGGGSGGGGSDKTHTCPPCPAPELLGGPSVFLFPPKPKDTLMISRTPEVTCVVVDVSHEDPEVKFNWYVDGVEVHNAKTKPCEEQYGSTYRCVSVLTVLHQDWLNGKEYKCKVSNKALPAPIEKTISKAKGQPREPQVYTLPPSREEMTKNQVSLTCLVKGFYPSDIAVEWESNGQPENNYKTTPPVLDSDGSFFLYSKLTVDKSRWQQGNVFSCSVMHEALHNHYTQKSLSLSPGK

SEQ ID NO: 451 - protein, 5 aa, Artificial Sequence
  Synthetic Polypeptide
  MISC_FEATURE: MU 1-E9 CC x I2C0-scFc VH CDR1
SYGMH

SEQ ID NO: 452 - protein, 17 aa, Artificial Sequence
  Synthetic Polypeptide
  MISC_FEATURE: MU 1-E9 CC x I2C0-scFc VH CDR2
VIWFHGSNKYYAESVKG

SEQ ID NO: 453 - protein, 9 aa, Artificial Sequence
  Synthetic Polypeptide
  MISC_FEATURE: MU 1-E9 CC x I2C0-scFc VH CDR3
GAYTYGFDY

SEQ ID NO: 454 - protein, 11 aa, Artificial Sequence
  Synthetic Polypeptide
  MISC_FEATURE: MU 1-E9 CC x I2C0-scFc VL CDR1
RASQSINRYLA

SEQ ID NO: 455 - protein, 7 aa, Artificial Sequence
  Synthetic Polypeptide
  MISC_FEATURE: MU 1-E9 CC x I2C0-scFc VL CDR2
TASNRAT

SEQ ID NO: 456 - protein, 9 aa, Artificial Sequence
  Synthetic Polypeptide
  MISC_FEATURE: MU 1-E9 CC x I2C0-scFc VL CDR3
HHYGSSIFT

SEQ ID NO: 457 - protein, 118 aa, Artificial Sequence
  Synthetic Polypeptide
  MISC_FEATURE: MU 1-E9 CC x I2C0-scFc VH
QVQLVESGGGVVKPGRSLRLSCAASGFTFSSYGMHWVRQAPGKCLEWVAVIWFHGSNKYYAESVKGRFTISRDNSKNTLYLQMNNLRAEDTAVYYCARGAYTYGFDYWGQGTLVTVSS

SEQ ID NO: 458 - protein, 107 aa, Artificial Sequence; identical to SEQ ID NO: 205
  Synthetic Polypeptide
  MISC_FEATURE: MU 1-E9 CC x I2C0-scFc VL

SEQ ID NO: 459 - protein, 240 aa, Artificial Sequence
  Synthetic Polypeptide
  MISC_FEATURE: MU 1-E9 CC x I2C0-scFc scFv
QVQLVESGGGVVKPGRSLRLSCAASGFTFSSYGMHWVRQAPGKCLEWVAVIWFHGSNKYYAESVKGRFTISRDNSKNTLYLQMNNLRAEDTAVYYCARGAYTYGFDYWGQGTLVTVSSGGGGSGGGGSGGGGSEIVLTQSPGTLSLSPGERATLSCRASQSINRYLAWYQQKPGQAPRLLIYTASNRATGIPDRFSGSGSGTDFTLTISRLEPEDFAVYYCHHYGSSIFTFGCGTKVEIK

SEQ ID NO: 460 - protein, 495 aa, Artificial Sequence
  Synthetic Polypeptide
  MISC_FEATURE: MU 1-E9 CC x I2C0-scFc Bispecific molecule
QVQLVESGGGVVKPGRSLRLSCAASGFTFSSYGMHWVRQAPGKCLEWVAVIWFHGSNKYYAESVKGRFTISRDNSKNTLYLQMNNLRAEDTAVYYCARGAYTYGFDYWGQGTLVTVSSGGGGSGGGGSGGGGSEIVLTQSPGTLSLSPGERATLSCRASQSINRYLAWYQQKPGQAPRLLIYTASNRATGIPDRFSGSGSGTDFTLTISRLEPEDFAVYYCHHYGSSIFTFGCGTKVEIKSGGGGSEVQLVESGGGLVQPGGSLKLSCAASGFTFNKYAMNWVRQAPGKGLEWVARIRSKYNNYATYYADSVKDRFTISRDDSKNTAYLQMNNLKTEDTAVYYCVRHGNFGNSYISYWAYWGQGTLVTVSSGGGGSGGGGSGGGGSQTVVTQEPSLTVSPGGTVTLTCGSSTGAVTSGNYPNWVQQKPGQAPRGLIGGTKFLAPGTPARFSGSLLGGKAALTLSGVQPEDEAEYYCVLWYSNRWVFGGGTKLTVL

SEQ ID NO: 461 - protein, 983 aa, Artificial Sequence
  Synthetic Polypeptide
  MISC_FEATURE: MU 1-E9 CC x I2C0-scFc Bispecific HLE molecule
QVQLVESGGGVVKPGRSLRLSCAASGFTFSSYGMHWVRQAPGKCLEWVAVIWFHGSNKYYAESVKGRFTISRDNSKNTLYLQMNNLRAEDTAVYYCARGAYTYGFDYWGQGTLVTVSSGGGGSGGGGSGGGGSEIVLTQSPGTLSLSPGERATLSCRASQSINRYLAWYQQKPGQAPRLLIYTASNRATGIPDRFSGSGSGTDFTLTISRLEPEDFAVYYCHHYGSSIFTFGCGTKVEIKSGGGGSEVQLVESGGGLVQPGGSLKLSCAASGFTFNKYAMNWVRQAPGKGLEWVARIRSKYNNYATYYADSVKDRFTISRDDSKNTAYLQMNNLKTEDTAVYYCVRHGNFGNSYISYWAYWGQGTLVTVSSGGGGSGGGGSGGGGSQTVVTQEPSLTVSPGGTVTLTCGSSTGAVTSGNYPNWVQQKPGQAPRGLIGGTKFLAPGTPARFSGSLLGGKAALTLSGVQPEDEAEYYCVLWYSNRWVFGGGTKLTVLGGGGDKTHTCPPCPAPELLGGPSVFLFPPKPKDTLMISRTPEVTCVVVDVSHEDPEVKFNWYVDGVEVHNAKTKPCEEQYGSTYRCVSVLTVLHQDWLNGKEYKCKVSNKALPAPIEKTISKAKGQPREPQVYTLPPSREEMTKNQVSLTCLVKGFYPSDIAVEWESNGQPENNYKTTPPVLDSDGSFFLYSKLTVDKSRWQQGNVFSCSVMHEALHNHYTQKSLSLSPGKGGGGSGGGGSGGGGSGGGGSGGGGSGGGGSDKTHTCPPCPAPELLGGPSVFLFPPKPKDTLMISRTPEVTCVVVDVSHEDPEVKFNWYVDGVEVHNAKTKPCEEQYGSTYRCVSVLTVLHQDWLNGKEYKCKVSNKALPAPIEKTISKAKGQPREPQVYTLPPSREEMTKNQVSLTCLVKGFYPSDIAVEWESNGQPENNYKTTPPVLDSDGSFFLYSKLTVDKSRWQQGNVFSCSVMHEALHNHYTQKSLSLSPGK

SEQ ID NO: 462 - protein, 5 aa, Artificial Sequence
  Synthetic Polypeptide
  MISC_FEATURE: MU 1-B10 CC x I2C0-scFc VH CDR1
NFGMH

SEQ ID NO: 463 - protein, 17 aa, Artificial Sequence
  Synthetic Polypeptide
  MISC_FEATURE: MU 1-B10 CC x I2C0-scFc VH CDR2
VIWFDASKTYYAEAVKG

SEQ ID NO: 464 - protein, 12 aa, Artificial Sequence
  Synthetic Polypeptide
  MISC_FEATURE: MU 1-B10 CC x I2C0-scFc VH CDR3
ATYSTGWSYFDY

SEQ ID NO: 465 - protein, 11 aa, Artificial Sequence
  Synthetic Polypeptide
  MISC_FEATURE: MU 1-B10 CC x I2C0-scFc VL CDR1
SGDKLGDKYTS

SEQ ID NO: 466 - protein, 7 aa, Artificial Sequence
  Synthetic Polypeptide
  MISC_FEATURE: MU 1-B10 CC x I2C0-scFc VL CDR2
HDAKRPS

SEQ ID NO: 467 - protein, 10 aa, Artificial Sequence
  Synthetic Polypeptide
  MISC_FEATURE: MU 1-B10 CC x I2C0-scFc VL CDR3
QAWSASTAWV

SEQ ID NO: 468 - protein, 121 aa, Artificial Sequence; identical to SEQ ID NO: 248
  Synthetic Polypeptide
  MISC_FEATURE: MU 1-B10 CC x I2C0-scFc VH

SEQ ID NO: 469 - protein, 107 aa, Artificial Sequence; identical to SEQ ID NO: 337
  Synthetic Polypeptide
  MISC_FEATURE: MU 1-B10 CC x I2C0-scFc VL

SEQ ID NO: 470 - protein, 243 aa, Artificial Sequence
  Synthetic Polypeptide
  MISC_FEATURE: MU 1-B10 CC x I2C0-scFc scFv
QVQLVESGGGVVQPGRSLRLSCAASGFTFSNFGMHWVRQAPGKCLEWVAVIWFDASKTYYAEAVKGRFTISRDTSMNTLYLQMNSLRAEDTAVYYCARATYSTGWSYFDYWGQGTLVTVSSGGGGSGGGGSGGGGSSYELTQPPSVSVSPGQTASITCSGDKLGDKYTSWYQQKPGQSPVLVIYHDAKRPSGIPERFSGSNSGNTATLTISGTQAMDEADYYCQAWSASTAWVFGCGTKLTVL

SEQ ID NO: 471 - protein, 498 aa, Artificial Sequence
  Synthetic Polypeptide
  MISC_FEATURE: MU 1-B10 CC x I2C0-scFc Bispecific molecule
QVQLVESGGGVVQPGRSLRLSCAASGFTFSNFGMHWVRQAPGKCLEWVAVIWFDASKTYYAEAVKGRFTISRDTSMNTLYLQMNSLRAEDTAVYYCARATYSTGWSYFDYWGQGTLVTVSSGGGGSGGGGSGGGGSSYELTQPPSVSVSPGQTASITCSGDKLGDKYTSWYQQKPGQSPVLVIYHDAKRPSGIPERFSGSNSGNTATLTISGTQAMDEADYYCQAWSASTAWVFGCGTKLTVLSGGGGSEVQLVESGGGLVQPGGSLKLSCAASGFTFNKYAMNWVRQAPGKGLEWVARIRSKYNNYATYYADSVKDRFTISRDDSKNTAYLQMNNLKTEDTAVYYCVRHGNFGNSYISYWAYWGQGTLVTVSSGGGGSGGGGSGGGGSQTVVTQEPSLTVSPGGTVTLTCGSSTGAVTSGNYPNWVQQKPGQAPRGLIGGTKFLAPGTPARFSGSLLGGKAALTLSGVQPEDEAEYYCVLWYSNRWVFGGGTKLTVL

SEQ ID NO: 472 - protein, 986 aa, Artificial Sequence
  Synthetic Polypeptide
  MISC_FEATURE: MU 1-B10 CC x I2C0-scFc Bispecific HLE molecule
QVQLVESGGGVVQPGRSLRLSCAASGFTFSNFGMHWVRQAPGKCLEWVAVIWFDASKTYYAEAVKGRFTISRDTSMNTLYLQMNSLRAEDTAVYYCARATYSTGWSYFDYWGQGTLVTVSSGGGGSGGGGSGGGGSSYELTQPPSVSVSPGQTASITCSGDKLGDKYTSWYQQKPGQSPVLVIYHDAKRPSGIPERFSGSNSGNTATLTISGTQAMDEADYYCQAWSASTAWVFGCGTKLTVLSGGGGSEVQLVESGGGLVQPGGSLKLSCAASGFTFNKYAMNWVRQAPGKGLEWVARIRSKYNNYATYYADSVKDRFTISRDDSKNTAYLQMNNLKTEDTAVYYCVRHGNFGNSYISYWAYWGQGTLVTVSSGGGGSGGGGSGGGGSQTVVTQEPSLTVSPGGTVTLTCGSSTGAVTSGNYPNWVQQKPGQAPRGLIGGTKFLAPGTPARFSGSLLGGKAALTLSGVQPEDEAEYYCVLWYSNRWVFGGGTKLTVLGGGGDKTHTCPPCPAPELLGGPSVFLFPPKPKDTLMISRTPEVTCVVVDVSHEDPEVKFNWYVDGVEVHNAKTKPCEEQYGSTYRCVSVLTVLHQDWLNGKEYKCKVSNKALPAPIEKTISKAKGQPREPQVYTLPPSREEMTKNQVSLTCLVKGFYPSDIAVEWESNGQPENNYKTTPPVLDSDGSFFLYSKLTVDKSRWQQGNVFSCSVMHEALHNHYTQKSLSLSPGKGGGGSGGGGSGGGGSGGGGSGGGGSGGGGSDKTHTCPPCPAPELLGGPSVFLFPPKPKDTLMISRTPEVTCVVVDVSHEDPEVKFNWYVDGVEVHNAKTKPCEEQYGSTYRCVSVLTVLHQDWLNGKEYKCKVSNKALPAPIEKTISKAKGQPREPQVYTLPPSREEMTKNQVSLTCLVKGFYPSDIAVEWESNGQPENNYKTTPPVLDSDGSFFLYSKLTVDKSRWQQGNVFSCSVMHEALHNHYTQKSLSLSPGK

SEQ ID NO: 473 - protein, 5 aa, Artificial Sequence
  Synthetic Polypeptide
  MISC_FEATURE: MU 1-B6 CC x I2C0-scFc VH CDR1
GYYWS

SEQ ID NO: 474 - protein, 16 aa, Artificial Sequence
  Synthetic Polypeptide
  MISC_FEATURE: MU 1-B6 CC x I2C0-scFc VH CDR2
DIDYSGSTKYNPSLKS

SEQ ID NO: 475 - protein, 12 aa, Artificial Sequence
  Synthetic Polypeptide
  MISC_FEATURE: MU 1-B6 CC x I2C0-scFc VH CDR3
KKYSTVWSYFDY

SEQ ID NO: 476 - protein, 11 aa, Artificial Sequence
  Synthetic Polypeptide
  MISC_FEATURE: MU 1-B6 CC x I2C0-scFc VL CDR1
SGDKLGDKYAN

SEQ ID NO: 477 - protein, 7 aa, Artificial Sequence
  Synthetic Polypeptide
  MISC_FEATURE: MU 1-B6 CC x I2C0-scFc VL CDR2
HDNKRPS

SEQ ID NO: 478 - protein, 9 aa, Artificial Sequence
  Synthetic Polypeptide
  MISC_FEATURE: MU 1-B6 CC x I2C0-scFc VL CDR3
QAYGISSAV

SEQ ID NO: 479 - protein, 120 aa, Artificial Sequence; identical to SEQ ID NO: 292
  Synthetic Polypeptide
  MISC_FEATURE: MU 1-B6 CC x I2C0-scFc VH

SEQ ID NO: 480 - protein, 106 aa, Artificial Sequence
  Synthetic Polypeptide
  MISC_FEATURE: MU 1-B6 CC x I2C0-scFc VL
SYELTQPASASVSPGQTASITCSGDKLGDKYANWYQQKPGQSPILVIYHDNKRPSGIPERFSGSNSGNTATLTISGTQAMDEADYYCQAYGISSAVFGCGTKLTVL

SEQ ID NO: 481 - protein, 241 aa, Artificial Sequence
  Synthetic Polypeptide
  MISC_FEATURE: MU 1-B6 CC x I2C0-scFc scFv
QVQLQQWGAGLLKPSETLSLTCAVYGGSFSGYYWSWIRQPPGKCLEWIGDIDYSGSTKYNPSLKSRVTISLDTSKNQFSLKLNSVTAADTAVYFCARKKYSTVWSYFDYWGQGTLVTVSSGGGGSGGGGSGGGGSSYELTQPASASVSPGQTASITCSGDKLGDKYANWYQQKPGQSPILVIYHDNKRPSGIPERFSGSNSGNTATLTISGTQAMDEADYYCQAYGISSAVFGCGTKLTVL

SEQ ID NO: 482 - protein, 496 aa, Artificial Sequence
  Synthetic Polypeptide
  MISC_FEATURE: MU 1-B6 CC x I2C0-scFc Bispecific molecule
QVQLQQWGAGLLKPSETLSLTCAVYGGSFSGYYWSWIRQPPGKCLEWIGDIDYSGSTKYNPSLKSRVTISLDTSKNQFSLKLNSVTAADTAVYFCARKKYSTVWSYFDYWGQGTLVTVSSGGGGSGGGGSGGGGSSYELTQPASASVSPGQTASITCSGDKLGDKYANWYQQKPGQSPILVIYHDNKRPSGIPERFSGSNSGNTATLTISGTQAMDEADYYCQAYGISSAVFGCGTKLTVLSGGGGSEVQLVESGGGLVQPGGSLKLSCAASGFTFNKYAMNWVRQAPGKGLEWVARIRSKYNNYATYYADSVKDRFTISRDDSKNTAYLQMNNLKTEDTAVYYCVRHGNFGNSYISYWAYWGQGTLVTVSSGGGGSGGGGSGGGGSQTVVTQEPSLTVSPGGTVTLTCGSSTGAVTSGNYPNWVQQKPGQAPRGLIGGTKFLAPGTPARFSGSLLGGKAALTLSGVQPEDEAEYYCVLWYSNRWVFGGGTKLTVL

SEQ ID NO: 483 - protein, 984 aa, Artificial Sequence
  Synthetic Polypeptide
  MISC_FEATURE: MU 1-B6 CC x I2C0-scFc Bispecific HLE molecule
QVQLQQWGAGLLKPSETLSLTCAVYGGSFSGYYWSWIRQPPGKCLEWIGDIDYSGSTKYNPSLKSRVTISLDTSKNQFSLKLNSVTAADTAVYFCARKKYSTVWSYFDYWGQGTLVTVSSGGGGSGGGGSGGGGSSYELTQPASASVSPGQTASITCSGDKLGDKYANWYQQKPGQSPILVIYHDNKRPSGIPERFSGSNSGNTATLTISGTQAMDEADYYCQAYGISSAVFGCGTKLTVLSGGGGSEVQLVESGGGLVQPGGSLKLSCAASGFTFNKYAMNWVRQAPGKGLEWVARIRSKYNNYATYYADSVKDRFTISRDDSKNTAYLQMNNLKTEDTAVYYCVRHGNFGNSYISYWAYWGQGTLVTVSSGGGGSGGGGSGGGGSQTVVTQEPSLTVSPGGTVTLTCGSSTGAVTSGNYPNWVQQKPGQAPRGLIGGTKFLAPGTPARFSGSLLGGKAALTLSGVQPEDEAEYYCVLWYSNRWVFGGGTKLTVLGGGGDKTHTCPPCPAPELLGGPSVFLFPPKPKDTLMISRTPEVTCVVVDVSHEDPEVKFNWYVDGVEVHNAKTKPCEEQYGSTYRCVSVLTVLHQDWLNGKEYKCKVSNKALPAPIEKTISKAKGQPREPQVYTLPPSREEMTKNQVSLTCLVKGFYPSDIAVEWESNGQPENNYKTTPPVLDSDGSFFLYSKLTVDKSRWQQGNVFSCSVMHEALHNHYTQKSLSLSPGKGGGGSGGGGSGGGGSGGGGSGGGGSGGGGSDKTHTCPPCPAPELLGGPSVFLFPPKPKDTLMISRTPEVTCVVVDVSHEDPEVKFNWYVDGVEVHNAKTKPCEEQYGSTYRCVSVLTVLHQDWLNGKEYKCKVSNKALPAPIEKTISKAKGQPREPQVYTLPPSREEMTKNQVSLTCLVKGFYPSDIAVEWESNGQPENNYKTTPPVLDSDGSFFLYSKLTVDKSRWQQGNVFSCSVMHEALHNHYTQKSLSLSPGK

SEQ ID NO: 484 - protein, 5 aa, Artificial Sequence
  Synthetic Polypeptide
  MISC_FEATURE: MU 1-A6 CC x I2C0-scFc VH CDR1
GYYWS

SEQ ID NO: 485 - protein, 16 aa, Artificial Sequence
  Synthetic Polypeptide
  MISC_FEATURE: MU 1-A6 CC x I2C0-scFc VH CDR2
DIDQSGSTKYNPSLKS

SEQ ID NO: 486 - protein, 12 aa, Artificial Sequence
  Synthetic Polypeptide
  MISC_FEATURE: MU 1-A6 CC x I2C0-scFc VH CDR3
KKYSTVWSYFDY

SEQ ID NO: 487 - protein, 11 aa, Artificial Sequence
  Synthetic Polypeptide
  MISC_FEATURE: MU 1-A6 CC x I2C0-scFc VL CDR1
SGDKLGDKYAS

SEQ ID NO: 488 - protein, 7 aa, Artificial Sequence
  Synthetic Polypeptide
  MISC_FEATURE: MU 1-A6 CC x I2C0-scFc VL CDR2
QDRKRPS

SEQ ID NO: 489 - protein, 9 aa, Artificial Sequence
  Synthetic Polypeptide
  MISC_FEATURE: MU 1-A6 CC x I2C0-scFc VL CDR3
QAWGSSAAV

SEQ ID NO: 490 - protein, 120 aa, Artificial Sequence; identical to SEQ ID NO: 171
  Synthetic Polypeptide
  MISC_FEATURE: MU 1-A6 CC x I2C0-scFc VH

SEQ ID NO: 491 - protein, 106 aa, Artificial Sequence
  Synthetic Polypeptide
  MISC_FEATURE: MU 1-A6 CC x I2C0-scFc VL
SYELTQPSSVSVPPGQTASITCSGDKLGDKYASWYQQKPGQSPVLVIYQDRKRPSGVPERFSGSNSGNTATLTISGTQAMDEADYYCQAWGSSAAVFGCGTKLTVL

SEQ ID NO: 492 - protein, 241 aa, Artificial Sequence
  Synthetic Polypeptide
  MISC_FEATURE: MU 1-A6 CC x I2C0-scFc scFv
QVQLQQWGAGLLKPSETLSLTCAVYGGSFSGYYWSWIRQPPGKCLEWIGDIDQSGSTKYNPSLKSRVTISLDTSKNQFSLKLNSVTAADTAVYFCARKKYSTVWSYFDYWGQGTLVTVSSGGGGSGGGGSGGGGSSYELTQPSSVSVPPGQTASITCSGDKLGDKYASWYQQKPGQSPVLVIYQDRKRPSGVPERFSGSNSGNTATLTISGTQAMDEADYYCQAWGSSAAVFGCGTKLTVL

SEQ ID NO: 493 - protein, 496 aa, Artificial Sequence
  Synthetic Polypeptide
  MISC_FEATURE: MU 1-A6 CC x I2C0-scFc Bispecific molecule
QVQLQQWGAGLLKPSETLSLTCAVYGGSFSGYYWSWIRQPPGKCLEWIGDIDQSGSTKYNPSLKSRVTISLDTSKNQFSLKLNSVTAADTAVYFCARKKYSTVWSYFDYWGQGTLVTVSSGGGGSGGGGSGGGGSSYELTQPSSVSVPPGQTASITCSGDKLGDKYASWYQQKPGQSPVLVIYQDRKRPSGVPERFSGSNSGNTATLTISGTQAMDEADYYCQAWGSSAAVFGCGTKLTVLSGGGGSEVQLVESGGGLVQPGGSLKLSCAASGFTFNKYAMNWVRQAPGKGLEWVARIRSKYNNYATYYADSVKDRFTISRDDSKNTAYLQMNNLKTEDTAVYYCVRHGNFGNSYISYWAYWGQGTLVTVSSGGGGSGGGGSGGGGSQTVVTQEPSLTVSPGGTVTLTCGSSTGAVTSGNYPNWVQQKPGQAPRGLIGGTKFLAPGTPARFSGSLLGGKAALTLSGVQPEDEAEYYCVLWYSNRWVFGGGTKLTVL

SEQ ID NO: 494 - protein, 984 aa, Artificial Sequence
  Synthetic Polypeptide
  MISC_FEATURE: MU 1-A6 CC x I2C0-scFc Bispecific HLE molecule
QVQLQQWGAGLLKPSETLSLTCAVYGGSFSGYYWSWIRQPPGKCLEWIGDIDQSGSTKYNPSLKSRVTISLDTSKNQFSLKLNSVTAADTAVYFCARKKYSTVWSYFDYWGQGTLVTVSSGGGGSGGGGSGGGGSSYELTQPSSVSVPPGQTASITCSGDKLGDKYASWYQQKPGQSPVLVIYQDRKRPSGVPERFSGSNSGNTATLTISGTQAMDEADYYCQAWGSSAAVFGCGTKLTVLSGGGGSEVQLVESGGGLVQPGGSLKLSCAASGFTFNKYAMNWVRQAPGKGLEWVARIRSKYNNYATYYADSVKDRFTISRDDSKNTAYLQMNNLKTEDTAVYYCVRHGNFGNSYISYWAYWGQGTLVTVSSGGGGSGGGGSGGGGSQTVVTQEPSLTVSPGGTVTLTCGSSTGAVTSGNYPNWVQQKPGQAPRGLIGGTKFLAPGTPARFSGSLLGGKAALTLSGVQPEDEAEYYCVLWYSNRWVFGGGTKLTVLGGGGDKTHTCPPCPAPELLGGPSVFLFPPKPKDTLMISRTPEVTCVVVDVSHEDPEVKFNWYVDGVEVHNAKTKPCEEQYGSTYRCVSVLTVLHQDWLNGKEYKCKVSNKALPAPIEKTISKAKGQPREPQVYTLPPSREEMTKNQVSLTCLVKGFYPSDIAVEWESNGQPENNYKTTPPVLDSDGSFFLYSKLTVDKSRWQQGNVFSCSVMHEALHNHYTQKSLSLSPGKGGGGSGGGGSGGGGSGGGGSGGGGSGGGGSDKTHTCPPCPAPELLGGPSVFLFPPKPKDTLMISRTPEVTCVVVDVSHEDPEVKFNWYVDGVEVHNAKTKPCEEQYGSTYRCVSVLTVLHQDWLNGKEYKCKVSNKALPAPIEKTISKAKGQPREPQVYTLPPSREEMTKNQVSLTCLVKGFYPSDIAVEWESNGQPENNYKTTPPVLDSDGSFFLYSKLTVDKSRWQQGNVFSCSVMHEALHNHYTQKSLSLSPGK

SEQ ID NO: 495 - protein, 5 aa, Artificial Sequence
  Synthetic Polypeptide
  MISC_FEATURE: MU 0-F9 CC x I2C0-scFc VH CDR1
SFGMH

SEQ ID NO: 496 - protein, 17 aa, Artificial Sequence
  Synthetic Polypeptide
  MISC_FEATURE: MU 0-F9 CC x I2C0-scFc VH CDR2
VIWYTGSNKYYASSVKG

SEQ ID NO: 497 - protein, 9 aa, Artificial Sequence
  Synthetic Polypeptide
  MISC_FEATURE: MU 0-F9 CC x I2C0-scFc VH CDR3
GGYTYGFDY

SEQ ID NO: 498 - protein, 11 aa, Artificial Sequence
  Synthetic Polypeptide
  MISC_FEATURE: MU 0-F9 CC x I2C0-scFc VL CDR1
RASQSINRYLA

SEQ ID NO: 499 - protein, 7 aa, Artificial Sequence
  Synthetic Polypeptide
  MISC_FEATURE: MU 0-F9 CC x I2C0-scFc VL CDR2
TASNRAT

SEQ ID NO: 500 - protein, 9 aa, Artificial Sequence
  Synthetic Polypeptide
  MISC_FEATURE: MU 0-F9 CC x I2C0-scFc VL CDR3
HHYGSSIFT

SEQ ID NO: 501 - protein, 118 aa, Artificial Sequence
  Synthetic Polypeptide
  MISC_FEATURE: MU 0-F9 CC x I2C0-scFc VH
QVQLVESGGGLVKPGGSLRLSCAASGFTFSSFGMHWVRQAPGKCLEWVAVIWYTGSNKYYASSVKGRFTISRDNSKNTLYLQMNNLRAEDTAVYYCARGGYTYGFDYWGQGTLVTVSS

SEQ ID NO: 502 - protein, 107 aa, Artificial Sequence; identical to SEQ ID NO: 205
  Synthetic Polypeptide
  MISC_FEATURE: MU 0-F9 CC x I2C0-scFc VL

SEQ ID NO: 503 - protein, 240 aa, Artificial Sequence
  Synthetic Polypeptide
  MISC_FEATURE: MU 0-F9 CC x I2C0-scFc scFv
QVQLVESGGGLVKPGGSLRLSCAASGFTFSSFGMHWVRQAPGKCLEWVAVIWYTGSNKYYASSVKGRFTISRDNSKNTLYLQMNNLRAEDTAVYYCARGGYTYGFDYWGQGTLVTVSSGGGGSGGGGSGGGGSEIVLTQSPGTLSLSPGERATLSCRASQSINRYLAWYQQKPGQAPRLLIYTASNRATGIPDRFSGSGSGTDFTLTISRLEPEDFAVYYCHHYGSSIFTFGCGTKVEIK

SEQ ID NO: 504 - protein, 495 aa, Artificial Sequence
  Synthetic Polypeptide
  MISC_FEATURE: MU 0-F9 CC x I2C0-scFc Bispecific molecule
QVQLVESGGGLVKPGGSLRLSCAASGFTFSSFGMHWVRQAPGKCLEWVAVIWYTGSNKYYASSVKGRFTISRDNSKNTLYLQMNNLRAEDTAVYYCARGGYTYGFDYWGQGTLVTVSSGGGGSGGGGSGGGGSEIVLTQSPGTLSLSPGERATLSCRASQSINRYLAWYQQKPGQAPRLLIYTASNRATGIPDRFSGSGSGTDFTLTISRLEPEDFAVYYCHHYGSSIFTFGCGTKVEIKSGGGGSEVQLVESGGGLVQPGGSLKLSCAASGFTFNKYAMNWVRQAPGKGLEWVARIRSKYNNYATYYADSVKDRFTISRDDSKNTAYLQMNNLKTEDTAVYYCVRHGNFGNSYISYWAYWGQGTLVTVSSGGGGSGGGGSGGGGSQTVVTQEPSLTVSPGGTVTLTCGSSTGAVTSGNYPNWVQQKPGQAPRGLIGGTKFLAPGTPARFSGSLLGGKAALTLSGVQPEDEAEYYCVLWYSNRWVFGGGTKLTVL

SEQ ID NO: 505 - protein, 983 aa, Artificial Sequence
  Synthetic Polypeptide
  MISC_FEATURE: MU 0-F9 CC x I2C0-scFc Bispecific HLE molecule
QVQLVESGGGLVKPGGSLRLSCAASGFTFSSFGMHWVRQAPGKCLEWVAVIWYTGSNKYYASSVKGRFTISRDNSKNTLYLQMNNLRAEDTAVYYCARGGYTYGFDYWGQGTLVTVSSGGGGSGGGGSGGGGSEIVLTQSPGTLSLSPGERATLSCRASQSINRYLAWYQQKPGQAPRLLIYTASNRATGIPDRFSGSGSGTDFTLTISRLEPEDFAVYYCHHYGSSIFTFGCGTKVEIKSGGGGSEVQLVESGGGLVQPGGSLKLSCAASGFTFNKYAMNWVRQAPGKGLEWVARIRSKYNNYATYYADSVKDRFTISRDDSKNTAYLQMNNLKTEDTAVYYCVRHGNFGNSYISYWAYWGQGTLVTVSSGGGGSGGGGSGGGGSQTVVTQEPSLTVSPGGTVTLTCGSSTGAVTSGNYPNWVQQKPGQAPRGLIGGTKFLAPGTPARFSGSLLGGKAALTLSGVQPEDEAEYYCVLWYSNRWVFGGGTKLTVLGGGGDKTHTCPPCPAPELLGGPSVFLFPPKPKDTLMISRTPEVTCVVVDVSHEDPEVKFNWYVDGVEVHNAKTKPCEEQYGSTYRCVSVLTVLHQDWLNGKEYKCKVSNKALPAPIEKTISKAKGQPREPQVYTLPPSREEMTKNQVSLTCLVKGFYPSDIAVEWESNGQPENNYKTTPPVLDSDGSFFLYSKLTVDKSRWQQGNVFSCSVMHEALHNHYTQKSLSLSPGKGGGGSGGGGSGGGGSGGGGSGGGGSGGGGSDKTHTCPPCPAPELLGGPSVFLFPPKPKDTLMISRTPEVTCVVVDVSHEDPEVKFNWYVDGVEVHNAKTKPCEEQYGSTYRCVSVLTVLHQDWLNGKEYKCKVSNKALPAPIEKTISKAKGQPREPQVYTLPPSREEMTKNQVSLTCLVKGFYPSDIAVEWESNGQPENNYKTTPPVLDSDGSFFLYSKLTVDKSRWQQGNVFSCSVMHEALHNHYTQKSLSLSPGK

SEQ ID NO: 506 - protein, 5 aa, Artificial Sequence
  Synthetic Polypeptide
  MISC_FEATURE: MU 0-F6 CC x I2C0-scFc VH CDR1
SYGMH

SEQ ID NO: 507 - protein, 17 aa, Artificial Sequence
  Synthetic Polypeptide
  MISC_FEATURE: MU 0-F6 CC x I2C0-scFc VH CDR2
VIWFDASNKYYAESVKG

SEQ ID NO: 508 - protein, 9 aa, Artificial Sequence
  Synthetic Polypeptide
  MISC_FEATURE: MU 0-F6 CC x I2C0-scFc VH CDR3
GGYTYGFDY

SEQ ID NO: 509 - protein, 11 aa, Artificial Sequence
  Synthetic Polypeptide
  MISC_FEATURE: MU 0-F6 CC x I2C0-scFc VL CDR1
RASQSINRYLA

SEQ ID NO: 510 - protein, 7 aa, Artificial Sequence
  Synthetic Polypeptide
  MISC_FEATURE: MU 0-F6 CC x I2C0-scFc VL CDR2
TASNRAT

SEQ ID NO: 511 - protein, 9 aa, Artificial Sequence
  Synthetic Polypeptide
  MISC_FEATURE: MU 0-F6 CC x I2C0-scFc VL CDR3
HHYGSSIFT

SEQ ID NO: 512 - protein, 118 aa, Artificial Sequence
  Synthetic Polypeptide
  MISC_FEATURE: MU 0-F6 CC x I2C0-scFc VH
QVQLVESGGGLVKPGRSLRLSCAASGFTFSSYGMHWVRQAPGKCLEWVAVIWFDASNKYYAESVKGRFTISRDNSKNTLYLQMNNLRAEDTAVYYCARGGYTYGFDYWGQGTLVTVSS

SEQ ID NO: 513 - protein, 107 aa, Artificial Sequence; identical to SEQ ID NO: 205
  Synthetic Polypeptide
  MISC_FEATURE: MU 0-F6 CC x I2C0-scFc VL

SEQ ID NO: 514 - protein, 240 aa, Artificial Sequence
  Synthetic Polypeptide
  MISC_FEATURE: MU 0-F6 CC x I2C0-scFc scFv
QVQLVESGGGLVKPGRSLRLSCAASGFTFSSYGMHWVRQAPGKCLEWVAVIWFDASNKYYAESVKGRFTISRDNSKNTLYLQMNNLRAEDTAVYYCARGGYTYGFDYWGQGTLVTVSSGGGGSGGGGSGGGGSEIVLTQSPGTLSLSPGERATLSCRASQSINRYLAWYQQKPGQAPRLLIYTASNRATGIPDRFSGSGSGTDFTLTISRLEPEDFAVYYCHHYGSSIFTFGCGTKVEIK

SEQ ID NO: 515 - protein, 495 aa, Artificial Sequence
  Synthetic Polypeptide
  MISC_FEATURE: MU 0-F6 CC x I2C0-scFc Bispecific molecule
QVQLVESGGGLVKPGRSLRLSCAASGFTFSSYGMHWVRQAPGKCLEWVAVIWFDASNKYYAESVKGRFTISRDNSKNTLYLQMNNLRAEDTAVYYCARGGYTYGFDYWGQGTLVTVSSGGGGSGGGGSGGGGSEIVLTQSPGTLSLSPGERATLSCRASQSINRYLAWYQQKPGQAPRLLIYTASNRATGIPDRFSGSGSGTDFTLTISRLEPEDFAVYYCHHYGSSIFTFGCGTKVEIKSGGGGSEVQLVESGGGLVQPGGSLKLSCAASGFTFNKYAMNWVRQAPGKGLEWVARIRSKYNNYATYYADSVKDRFTISRDDSKNTAYLQMNNLKTEDTAVYYCVRHGNFGNSYISYWAYWGQGTLVTVSSGGGGSGGGGSGGGGSQTVVTQEPSLTVSPGGTVTLTCGSSTGAVTSGNYPNWVQQKPGQAPRGLIGGTKFLAPGTPARFSGSLLGGKAALTLSGVQPEDEAEYYCVLWYSNRWVFGGGTKLTVL

SEQ ID NO: 516 - protein, 983 aa, Artificial Sequence
  Synthetic Polypeptide
  MISC_FEATURE: MU 0-F6 CC x I2C0-scFc Bispecific HLE molecule
QVQLVESGGGLVKPGRSLRLSCAASGFTFSSYGMHWVRQAPGKCLEWVAVIWFDASNKYYAESVKGRFTISRDNSKNTLYLQMNNLRAEDTAVYYCARGGYTYGFDYWGQGTLVTVSSGGGGSGGGGSGGGGSEIVLTQSPGTLSLSPGERATLSCRASQSINRYLAWYQQKPGQAPRLLIYTASNRATGIPDRFSGSGSGTDFTLTISRLEPEDFAVYYCHHYGSSIFTFGCGTKVEIKSGGGGSEVQLVESGGGLVQPGGSLKLSCAASGFTFNKYAMNWVRQAPGKGLEWVARIRSKYNNYATYYADSVKDRFTISRDDSKNTAYLQMNNLKTEDTAVYYCVRHGNFGNSYISYWAYWGQGTLVTVSSGGGGSGGGGSGGGGSQTVVTQEPSLTVSPGGTVTLTCGSSTGAVTSGNYPNWVQQKPGQAPRGLIGGTKFLAPGTPARFSGSLLGGKAALTLSGVQPEDEAEYYCVLWYSNRWVFGGGTKLTVLGGGGDKTHTCPPCPAPELLGGPSVFLFPPKPKDTLMISRTPEVTCVVVDVSHEDPEVKFNWYVDGVEVHNAKTKPCEEQYGSTYRCVSVLTVLHQDWLNGKEYKCKVSNKALPAPIEKTISKAKGQPREPQVYTLPPSREEMTKNQVSLTCLVKGFYPSDIAVEWESNGQPENNYKTTPPVLDSDGSFFLYSKLTVDKSRWQQGNVFSCSVMHEALHNHYTQKSLSLSPGKGGGGSGGGGSGGGGSGGGGSGGGGSGGGGSDKTHTCPPCPAPELLGGPSVFLFPPKPKDTLMISRTPEVTCVVVDVSHEDPEVKFNWYVDGVEVHNAKTKPCEEQYGSTYRCVSVLTVLHQDWLNGKEYKCKVSNKALPAPIEKTISKAKGQPREPQVYTLPPSREEMTKNQVSLTCLVKGFYPSDIAVEWESNGQPENNYKTTPPVLDSDGSFFLYSKLTVDKSRWQQGNVFSCSVMHEALHNHYTQKSLSLSPGK

SEQ ID NO: 517 - protein, 5 aa, Artificial Sequence
  Synthetic Polypeptide
  MISC_FEATURE: MU 0-E5 CC x I2C0-scFc VH CDR1
SYGMH

SEQ ID NO: 518 - protein, 17 aa, Artificial Sequence
  Synthetic Polypeptide
  MISC_FEATURE: MU 0-E5 CC x I2C0-scFc VH CDR2
VIWYDASNKYYATSVKG

SEQ ID NO: 519 - protein, 9 aa, Artificial Sequence
  Synthetic Polypeptide
  MISC_FEATURE: MU 0-E5 CC x I2C0-scFc VH CDR3
GGYTYGFDY

SEQ ID NO: 520 - protein, 11 aa, Artificial Sequence
  Synthetic Polypeptide
  MISC_FEATURE: MU 0-E5 CC x I2C0-scFc VL CDR1
RASQSINRYLA

SEQ ID NO: 521 - protein, 7 aa, Artificial Sequence
  Synthetic Polypeptide
  MISC_FEATURE: MU 0-E5 CC x I2C0-scFc VL CDR2
TASNRAT

SEQ ID NO: 522 - protein, 9 aa, Artificial Sequence
  Synthetic Polypeptide
  MISC_FEATURE: MU 0-E5 CC x I2C0-scFc VL CDR3
HHYGSSIFT

SEQ ID NO: 523 - protein, 118 aa, Artificial Sequence
  Synthetic Polypeptide
  MISC_FEATURE: MU 0-E5 CC x I2C0-scFc VH
QVQLVESGGGVVKPGRSLRLSCAASGFTFSSYGMHWVRQAPGKCLEWVAVIWYDASNKYYATSVKGRFTISRDNSKNTLYLQMNNLRAEDTAVYYCARGGYTYGFDYWGQGTLVTVSS

SEQ ID NO: 524 - protein, 107 aa, Artificial Sequence; identical to SEQ ID NO: 205
  Synthetic Polypeptide
  MISC_FEATURE: MU 0-E5 CC x I2C0-scFc VL

SEQ ID NO: 525 - protein, 240 aa, Artificial Sequence
  Synthetic Polypeptide
  MISC_FEATURE: MU 0-E5 CC x I2C0-scFc scFv
QVQLVESGGGVVKPGRSLRLSCAASGFTFSSYGMHWVRQAPGKCLEWVAVIWYDASNKYYATSVKGRFTISRDNSKNTLYLQMNNLRAEDTAVYYCARGGYTYGFDYWGQGTLVTVSSGGGGSGGGGSGGGGSEIVLTQSPGTLSLSPGERATLSCRASQSINRYLAWYQQKPGQAPRLLIYTASNRATGIPDRFSGSGSGTDFTLTISRLEPEDFAVYYCHHYGSSIFTFGCGTKVEIK

SEQ ID NO: 526 - protein, 495 aa, Artificial Sequence
  Synthetic Polypeptide
  MISC_FEATURE: MU 0-E5 CC x I2C0-scFc Bispecific molecule
QVQLVESGGGVVKPGRSLRLSCAASGFTFSSYGMHWVRQAPGKCLEWVAVIWYDASNKYYATSVKGRFTISRDNSKNTLYLQMNNLRAEDTAVYYCARGGYTYGFDYWGQGTLVTVSSGGGGSGGGGSGGGGSEIVLTQSPGTLSLSPGERATLSCRASQSINRYLAWYQQKPGQAPRLLIYTASNRATGIPDRFSGSGSGTDFTLTISRLEPEDFAVYYCHHYGSSIFTFGCGTKVEIKSGGGGSEVQLVESGGGLVQPGGSLKLSCAASGFTFNKYAMNWVRQAPGKGLEWVARIRSKYNNYATYYADSVKDRFTISRDDSKNTAYLQMNNLKTEDTAVYYCVRHGNFGNSYISYWAYWGQGTLVTVSSGGGGSGGGGSGGGGSQTVVTQEPSLTVSPGGTVTLTCGSSTGAVTSGNYPNWVQQKPGQAPRGLIGGTKFLAPGTPARFSGSLLGGKAALTLSGVQPEDEAEYYCVLWYSNRWVFGGGTKLTVL

SEQ ID NO: 527 - protein, 983 aa, Artificial Sequence
  Synthetic Polypeptide
  MISC_FEATURE: MU 0-E5 CC x I2C0-scFc Bispecific HLE molecule
QVQLVESGGGVVKPGRSLRLSCAASGFTFSSYGMHWVRQAPGKCLEWVAVIWYDASNKYYATSVKGRFTISRDNSKNTLYLQMNNLRAEDTAVYYCARGGYTYGFDYWGQGTLVTVSSGGGGSGGGGSGGGGSEIVLTQSPGTLSLSPGERATLSCRASQSINRYLAWYQQKPGQAPRLLIYTASNRATGIPDRFSGSGSGTDFTLTISRLEPEDFAVYYCHHYGSSIFTFGCGTKVEIKSGGGGSEVQLVESGGGLVQPGGSLKLSCAASGFTFNKYAMNWVRQAPGKGLEWVARIRSKYNNYATYYADSVKDRFTISRDDSKNTAYLQMNNLKTEDTAVYYCVRHGNFGNSYISYWAYWGQGTLVTVSSGGGGSGGGGSGGGGSQTVVTQEPSLTVSPGGTVTLTCGSSTGAVTSGNYPNWVQQKPGQAPRGLIGGTKFLAPGTPARFSGSLLGGKAALTLSGVQPEDEAEYYCVLWYSNRWVFGGGTKLTVLGGGGDKTHTCPPCPAPELLGGPSVFLFPPKPKDTLMISRTPEVTCVVVDVSHEDPEVKFNWYVDGVEVHNAKTKPCEEQYGSTYRCVSVLTVLHQDWLNGKEYKCKVSNKALPAPIEKTISKAKGQPREPQVYTLPPSREEMTKNQVSLTCLVKGFYPSDIAVEWESNGQPENNYKTTPPVLDSDGSFFLYSKLTVDKSRWQQGNVFSCSVMHEALHNHYTQKSLSLSPGKGGGGSGGGGSGGGGSGGGGSGGGGSGGGGSDKTHTCPPCPAPELLGGPSVFLFPPKPKDTLMISRTPEVTCVVVDVSHEDPEVKFNWYVDGVEVHNAKTKPCEEQYGSTYRCVSVLTVLHQDWLNGKEYKCKVSNKALPAPIEKTISKAKGQPREPQVYTLPPSREEMTKNQVSLTCLVKGFYPSDIAVEWESNGQPENNYKTTPPVLDSDGSFFLYSKLTVDKSRWQQGNVFSCSVMHEALHNHYTQKSLSLSPGK

SEQ ID NO: 528 - protein, 126 aa, Artificial Sequence
  Synthetic Polypeptide
  MISC_FEATURE: MUC17 epitope E2
EVVSSIDIGPPETISAQMELTVTVTSVKFTEELKNHSSQEFQEFKQTFTEQMNIVYSGIPEYVGVNITKLRLGSVVVEHDVLLRTKYTPEYKTVLDNATEVVKEKITKVTTQQIMINDICSDMMCF

SEQ ID NO: 529 - protein, 107 aa, Artificial Sequence
  Synthetic Polypeptide
  MISC_FEATURE: MUC17 epitope E2 (shortened)
SAQMELTVTVTSVKFTEELKNHSSQEFQEFKQTFTEQMNIVYSGIPEYVGVNITKLRLGSVVVEHDVLLRTKYTPEYKTVLDNATEVVKEKITKVTTQQIMINDICS

SEQ ID NO: 530 - protein, 113 aa, Artificial Sequence
  Synthetic Polypeptide
  MISC_FEATURE: MUC17 epitope 5A (part of E2)
RTTTCFGDGCQNTASRCKNGGTWDGLKCQCPNLYYGELCEEVVSSIDIGPPETISAQMELTVTVTSVKFTEELKNHSSQEFQEFKQTFTEQMNIVYSGIPEYVGVNITKLRLG

SEQ ID NO: 531 - protein, 146 aa, Artificial Sequence
  Synthetic Polypeptide
  MISC_FEATURE: MUC17 epitope 5B (part of E2)
SVVVEHDVLLRTKYTPEYKTVLDNATEVVKEKITKVTTQQIMINDICSDMMCFNTTGTQVQNITVTQYDPEEDCRKMAKEYGDYFVVEYRDQKPYCISPCEPGFSVSKNCNLGKCQMSLSGPQCLCVTTETHWYSGETCNQGTQKS

SEQ ID NO: 532 - protein, 220 aa, Artificial Sequence
  Synthetic Polypeptide
  MISC_FEATURE: MUC17 epitope E2 trunk2
EVVSSIDIGPPETISAQMELTVTVTSVKFTEELKNHSSQEFQEFKQTFTEQMNIVYSGIPEYVGVNITKLRLGSVVVEHDVLLRTKYTPEYKTVLDNATEVVKEKITKVTTQQIMINDICSDMMCFNTTGTQVQNITVTQYDPEEDCRKMAKEYGDYFVVEYRDQKPYCISPCEPGFSVSKNCNLGKCQMSLSGPQCLCVTTETHWYSGETCNQGTQKSL

SEQ ID NO: 533 - protein, 207 aa, Artificial Sequence
  Synthetic Polypeptide
  MISC_FEATURE: MUC17 epitope E2 trunk3
ISAQMELTVTVTSVKFTEELKNHSSQEFQEFKQTFTEQMNIVYSGIPEYVGVNITKLRLGSVVVEHDVLLRTKYTPEYKTVLDNATEVVKEKITKVTTQQIMINDICSDMMCFNTTGTQVQNITVTQYDPEEDCRKMAKEYGDYFVVEYRDQKPYCISPCEPGFSVSKNCNLGKCQMSLSGPQCLCVTTETHWYSGETCNQGTQKSL

SEQ ID NO: 534 - protein, 99 aa, Artificial Sequence
  Synthetic Polypeptide
  MISC_FEATURE: MUC17 epitope E2 trunk4
DMMCFNTTGTQVQNITVTQYDPEEDCRKMAKEYGDYFVVEYRDQKPYCISPCEPGFSVSKNCNLGKCQMSLSGPQCLCVTTETHWYSGETCNQGTQKSL

SEQ ID NO: 535 - protein, 50 aa, Artificial Sequence
  Synthetic Polypeptide
  MISC_FEATURE: MUC17 epitope E2 trunk5
SPCEPGFSVSKNCNLGKCQMSLSGPQCLCVTTETHWYSGETCNQGTQKSL
